(19) United States
(12) Patent Application Publication
(10) Pub. No.: US 2002/0023281 A1
(43) Pub. Date: Feb. 21, 2002

(54) Expressed sequences of arabidopsis thaliana

(76) Inventors: Jorn Gorlach, Durham, NC (US); Yong-Qiang An, San Diego, CA (US); Carol M. Hamilton, Apex, NC (US); Jennifer L. Price, Raleigh, NC (US); Tracy M. Raines, Durham, NC (US); Yang Yu, Martinsville, NJ (US); Joshua G. Rameaka, Durham, NC (US); Amy Page, Durham, NC (US); Abraham V. Mathew, Cary, NC (US); Brooke L. Ledford, Holly Springs, NC (US); Jeffrey P. Woessner, Hillsborough, NC (US); William David Haas, Durham, NC (US); Carlos A. Garcia, Carrboro, NC (US); Maja Kricker, Pittsboro, NC (US); Ted Slater, Apex, NC (US); Keith R. Davis, Durham, NC (US); Keith Allen, Cary, NC (US); Neil Hoffman, Chapel Hill, NC (US); Patrick Hurban, Raleigh, NC (US)

Correspondence Address: PARADIGM GENETICS, INC, 104 ALEXANDER DRIVE, BUILDING 2, P O BOX 14528, RTP, NC, 277094528

(21) Appl. No.: 09/770,445

(22) Filed: Jan. 26, 2001

Related U.S. Application Data
(60) Provisional application No. 60/178,472, filed on Jan. 27, 2000.

(51) Int. Cl. A01H 5/00; C12Q 1/00; C07H 21/04

(52) U.S. Cl. 800/288; 435/4; 536/23.2; 536/23.6

(57) ABSTRACT

Isolated nucleotide compositions and sequences are provided for Arabidopsis thaliana genes. The nucleic acid compositions find use in identifying homologous or related genes; in producing compositions that modulate the expression or function of its encoded protein, mapping functional regions of the protein; and in studying associated physiological pathways. The genetic sequences may also be used for the genetic manipulation of cells, particularly of plant cells. The encoded gene products and modified organisms are useful for screening of biologically active agents, e.g. fungicides, insecticides, etc.; for elucidating biochemical pathways; and the like.

### CROSS-REFERENCE TO RELATED APPLICATION

[0001] This application claims the benefit of U.S. Provisional Application 60/178,472 Filed Jan. 27, 2000.

### FIELD OF INVENTION

[0002] The invention is in the field of polynucleotide sequences of a plant, particularly sequences expressed in arabidopsis thaliana.

### BACKGROUND OF THE INVENTION

[0003] Plants and plant products have vast commercial importance in a wide variety of areas including food crops for human and animal consumption, flavor enhancers for food, and production of specialty chemicals for use in products such as medicaments and fragrances. In considering food crops for humans and livestock, genes such as those involved in a plant's resistance to insects, plant viruses, and fungi; genes involved in pollination; and genes whose products enhance the nutritional value of the food, are of major importance. A number of such genes have been described, see, for example, McCaskill and Croteau (1999) Nature Biotechnol. 17:31-36.

[0004] Despite recent advances in methods for identification, cloning, and characterization of genes, much remains to be learned about plant physiology in general, including how plants produce many of the above-mentioned products; mechanisms for resistance to herbicides, insects, plant viruses, fungi; elucidation of genes involved in specific biosynthetic pathways; and genes involved in environmental tolerance, e.g., salt tolerance, drought tolerance, or tolerance to anaerobic conditions.

[0005] Arabidopsis thaliana is a model system for genetic, molecular and biochemical studies of higher plants. Features of this plant that make it a model system for genetic and molecular biology research include a small genome size, organized into five chromosomes and containing an estimated 20,000 genes, a rapid life cycle, prolific seed production and, since it is small, it can easily be cultivation in limited space. A. thaliana is a member of the mustard family (Brassicaceae) with a broad natural distribution throughout Europe, Asia, and North America. Many different ecotypes have been collected from natural populations and are available for experimental analysis. The entire life cycle, including seed germination, formation of a rosette plant, bolting of the main stem, flowering, and maturation of the first seeds, is completed in 6 weeks. A large number of mutant lines are available that affect nearly all aspects of its growth. These features greatly facilitate the isolation of fundamentally interesting and potentially important genes for agronomic development

[0006] Most gene products from higher plants exhibit adequate sequence similarity to deduced amino acid sequences of other plant genes to permit assignment of probable gene function, if it is known, in any higher plant. It is likely that there will be very few protein-encoding angiosperm genes that do not have orthologs or paralogs in Arabidopsis. The developmental diversity of higher plants may be largely due to changes in the cis-regulatory sequences of transcriptional regulators and not in coding sequences.

[0007] Many advances reported over the past few years offer clear evidence that this plant is not only a very important model species for basic research, but also extremely valuable for applied plant scientists and plant breeders. Knowledge gained from Arabidopsis can be used directly to develop desired traits in plants of other species.

### Relevant Literature

[0008] Cold Spring Harbor Monograph 27 (1994) E. M. Meyerowitz and C. R. Somerville, eds. (CSH Laboratory Press). Annual Plant Reviews, Vol. 1: Arabidopsis (1998) M. Anderson and J. A. Roberts, eds. (CRC Press). Methods in Molecular Biology: Arabidopsis Protocols, Vol.82 (1997) J. M. Martinez-Zapater and J. Salinas, eds. (CRC Press).

[0009] Mayer et al (1999) Nature 402(6763):769-77; “Sequence and analysis of chromosome 4 of the plant Arabidopsis thaliana”. Lin et al. (1999) 402(6763):761-8, “Sequence and analysis of chromosome 2 of the plant Arabidopsis thaliana”. Meinke et al. (1998) Science 282:662-682, “Arabidopsis thaliana: a model plant for genome analysis”. Somerville and Somerville (1999) Science 285:380-383, “Plant functional genomics”. Mozo et al. (1999) Nat. Genet. 22:271-275, “A complete BAC-based physical map of the Arabidopsis thaliana genome”.

### SUMMARY OF THE INVENTION

[0010] Novel nucleic acid sequences of Arabidopsis thaliana, their encoded polypeptides and variants thereof, genes corresponding to these nucleic acids, and proteins expressed by the genes, are provided.

[0011] The invention also provides diagnostic, prophylactic and therapeutic agents employing such novel nucleic acids, their corresponding genes or gene products, including expression constructs, probes, antisense constructs, and the like. The genetic sequences may also be used for the genetic manipulation of plant cells, particularly dicotyledonous plants. The encoded gene products and modified organisms are useful for introducing or improving disease resistance and stress tolerance into plants; screening of biologically active agents, e.g. fungicides, etc.; for elucidating biochemical pathways; and the like.

[0012] In one embodiment of the invention, a nucleic acid is provided that comprises a start codon; an optional intervening sequence; a coding sequence capable of hybridizing under stringent conditions as set forth in SEQ ID NO:1 to 999; and an optional terminal sequence, wherein at least one of said optional sequences is present. Such a nucleic acid may correspond to naturally occurring Arabidopsis expressed sequences.

### DETAILED DESCRIPTION OF THE INVENTION

[0013] Novel nucleic acid sequences from Arabidopsis thaliana, their encoded polypeptides and variants thereof, genes corresponding to these nucleic acids and proteins expressed by the genes are provided. The invention also provides agents employing such novel nucleic acids, their corresponding genes or gene products, including expression constructs, probes, antisense constructs, and the like. The nucleotide sequences are provided in the attached SEQLIST.

[0014] Sequences include, but are not limited to, sequences that encode resistance proteins; sequences that encode tolerance factors; sequences encoding proteins or other factors that are involved, directly or indirectly in biochemical pathways such as metabolic or biosynthetic pathways, sequences involved in signal transduction, sequences involved in the regulation of gene expression, structural genes, and the like. Biosynthetic pathways of interest include, but are not limited to, biosynthetic pathways whose product (which may be an end product or an intermediate) is of commercial, nutritional, or medicinal value.

[0015] The sequences may be used in screening assays of various plant strains to determine the strains that are best capable of withstanding a particular disease or environmental stress. Sequences encoding activators and resistance proteins may be introduced into plants that are deficient in these sequences. Alternatively, the sequences may be introduced under the control of promoters that are convenient for induction of expression. The protein products may be used in screening programs for insecticides, fungicides and antibiotics to determine agents that mimic or enhance the resistance proteins. Such agents may be used in improved methods of treating crops to prevent or treat disease. The protein products may also be used in screening programs to identify agents which mimic or enhance the action of tolerance factors. Such agents may be used in improved methods of treating crops to enhance their tolerance to environmental stresses.

[0016] Still other embodiments of the invention provide methods for enhancing or inhibiting production of a biosynthetic product in a plant by introducing a nucleic acid of the invention into a plant cell, where the nucleic acid comprises sequences encoding a factor which is involved, directly or indirectly in a biosynthetic pathway whose products are of commercial, nutritional, or medicinal value include any factor, usually a protein or peptide, which regulates such a biosynthetic pathway; which is an intermediate in such a biosynthetic pathway; or which in itself is a product that increases the nutritional value of a food product; or which is a medicinal product; or which is any product of commercial value.

[0017] Transgenic plants containing the antisense nucleic acids of the invention are useful for identifying other mediators that may induce expression of proteins of interest; for establishing the extent to which any specific insect and/or pathogen is responsible for damage of a particular plant; for identifying other mediators that may enhance or induce tolerance to environmental stress; for identifying factors involved in biosynthetic pathways of nutritional, commercial, or medicinal value; or for identifying products of nutritional, commercial, or medicinal value.

[0018] In still other embodiments, the invention provides transgenic plants constructed by introducing a subject nucleic acid of the invention into a plant cell, and growing the cell into a callus and then into a plant; or, alternatively by breeding a transgenic plant from the subject process with a second plant to form an F1 or higher hybrid. The subject transgenic plants and progeny are used as crops for their enhanced disease resistance, enhanced traits of interest, for example size or flavor of fruit, length of growth cycle, etc., or for screening programs, e.g. to determine more effective insecticides, etc; used as crops which exhibit enhanced tolerance environmental stress; or used to produce a factor.

[0019] Those skilled in the art will recognize the agricultural advantages inherent in plants constructed to have either increased or decreased expression of resistance proteins; or increased or decreased tolerance to environmental factors; or which produce or over-produce one or more factors involved in a biosynthetic pathway whose product is of commercial, nutritional, or medicinal value. For example, such plants may have increased resistance to attack by predators, insects, pathogens, microorganisms, herbivores, mechanical damage and the like; may be more tolerant to environmental stress, e.g. may be better able to withstand drought conditions, freezing, and the like; or may produce a product not normally made in the plant, or may produce a product in higher than normal amounts, where the product has commercial, nutritional, or medicinal value. Plants which may be useful include dicotyledons and monocotyledons. Representative examples of plants in which the provided sequences may be useful include tomato, potato, tobacco, cotton, soybean, alfalfa, rape, and the like. Monocotyledons, more particularly grasses (Poaceae family) of interest, include, without limitation, Avena sativa (oat); Avena strigosa (black oat); Elymus (wild rye); Hordeum sp. including Hordeum vulgare (barley); Oryza sp., including Oryza glaberrima (African rice); Oryza longistaminata (long-staminate rice); Pennisetum americanum (pearl millet); Sorghum sp. (sorghum); Triticum sp., including Triticum aestivum (common wheat); Triticum durum (durum wheat); Zea mays (corn); etc.

### NUCLEIC ACID COMPOSITIONS

[0020] The following detailed description describes the nucleic acid compositions encompassed by the invention, methods for obtaining cDNA or genomic DNA encoding a full-length gene product, expression of these nucleic acids and genes; identification of structural motifs of the nucleic acids and genes; identification of the function of a gene product encoded by a gene corresponding to a nucleic acid of the invention; use of the provided nucleic acids as probes, in mapping, and in diagnosis; use of the corresponding polypeptides and other gene products to raise antibodies; use of the nucleic acids in genetic modification of plant and other species; and use of the nucleic acids, their encoded gene products, and modified organisms, for screening and diagnostic purposes.

[0021] The scope of the invention with respect to nucleic acid compositions includes, but is not necessarily limited to, nucleic acids having a sequence set forth in any one of SEQ ID NOS:1-999; nucleic acids that hybridize the provided sequences under stringent conditions; genes corresponding to the provided nucleic acids; variants of the provided nucleic acids and their corresponding genes, particularly those variants that retain a biological activity of the encoded gene product.

[0022] In one embodiment, the sequences of the invention provide a polypeptide coding sequence. The polypeptide coding sequence may correspond to a naturally expressed mRNA in Arabidopsis or other species, or may encode a fusion protein between one of the provided sequences and an exogenous protein coding sequence. The coding sequence is characterized by an ATG start codon, a lack of stop codons in-frame with the ATG, and a termination codon, that is, a continuous open frame is provided between the start and the stop codon. The sequence contained between the start and the stop codon will comprise a sequence capable of hybridizing under stringent conditions to a sequence set for in SEQ ID NO:1-999, and may comprise the sequence set forth in the Seqlist.

[0023] Other nucleic acid compositions contemplated by and within the scope of the present invention will be readily apparent to one of ordinary skill in the art when provided with the disclosure here.

[0024] The invention features nucleic acids that are derived from Arabidopsis thaliana. Novel nucleic acid compositions of the invention of particular interest comprise a sequence set forth in any one of SEQ ID NOS:1 -999 or an identifying sequence thereof. An “identifying sequence” is a contiguous sequence of residues at least about 10 nt to about 20 nt in length, usually at least about 50 nt to about 100 nt in length, that uniquely identifies a nucleic acid sequence, e.g., exhibits less than 90%, usually less than about 80% to about 85% sequence identity to any contiguous nucleotide sequence of more than about 20 nt. Thus, the subject novel nucleic acid compositions include full length cDNAs or mRNAs that encompass an identifying sequence of contiguous nucleotides from any one of SEQ ID NOS:1-999.

[0025] The nucleic acids of the invention also include nucleic acids having sequence similarity or sequence identity. Nucleic acids having sequence similarity are detected by hybridization under low stringency conditions, for example, at 50° C. and 10×SSC (0.9 M NaCl/0.09 M sodium citrate) and remain bound when subjected to washing at 55° C. in 1×SSC. Sequence identity can be determined by hybridization under stringent conditions, for example, at 50° C. or higher and 0.1×SSC (9 mM NaCl/0.9 mM sodium citrate). Hybridization methods and conditions are well known in the art, see U.S. Pat. No. 5,707,829. Nucleic acids that are substantially identical to the provided nucleic acid sequences, e.g. allelic variants, genetically altered versions of the gene, etc., bind to the provided nucleic acid sequences (SEQ ID NOS:1-999) under stringent hybridization conditions. By using probes, particularly labeled probes of DNA sequences, one can isolate homologous or related genes. The source of homologous genes can be any species, particularly grasses as previously described.

[0026] Preferably, hybridization is performed using at least 15 contiguous nucleotides of at least one of SEQ ID NOS:1-999. The probe will preferentially hybridize with a nucleic acid or mRNA comprising the complementary sequence, allowing the identification and retrieval of the nucleic acids of the biological material that uniquely hybridize to the selected probe. Probes of more than 15 nucleotides can be used, e.g. probes of from about 18 nucleotides up to the entire length of the provided nucleic acid sequences, but 15 nucleotides generally represents sufficient sequence for unique identification.

[0027] The nucleic acids of the invention also include naturally occurring variants of the nucleotide sequences, e.g. degenerate variants, allelic variants, etc. Variants of the nucleic acids of the invention are identified by hybridization of putative variants with nucleotide sequences disclosed herein, preferably by hybridization under stringent conditions For example, by using appropriate wash conditions, variants of the nucleic acids of the invention can be identified where the allelic variant exhibits at most about 25-30% base pair mismatches relative to the selected nucleic acid probe. In general, allelic variants contain 5-25% base pair mismatches, and can contain as little as even 2-5%, or 1-2% base pair mismatches, as well as a single base-pair mismatch.

[0028] The invention also encompasses homologs corresponding to the nucleic acids of SEQ ID NOS:1-999, where the source of homologous genes can be any related species, usually within the same genus or group. Homologs have substantial sequence similarity, e.g. at least 75% sequence identity, usually at least 90%, more usually at least 95% between nucleotide sequences. Sequence similarity is calculated based on a reference sequence, which may be a subset of a larger sequence, such as a conserved motif, coding region, flanking region, etc. A reference sequence will usually be at least about 18 contiguous nt long, more usually at least about 30 nt long, and may extend to the complete sequence that is being compared. Algorithms for sequence analysis are known in the art, such as BLAST, described in Altschul et al., J. Mol. Biol. (1990) 215:403-10.

[0029] In general, variants of the invention have a sequence identity greater than at least about 65%, preferably at least about 75%, more preferably at least about 85%, and can be greater than at least about 90% or more as determined by the Smith-Waterman homology search algorithm as implemented in MPSRCH program (Oxford Molecular). For the purposes of this invention, a preferred method of calculating percent identity is the Smith-Waterman algorithm, using the following. Global DNA sequence identity must be greater than 65% as determined by the Smith-Wateman homology search algorithm as implemented in MPSRCH program (Oxford Molecular) using an affine gap search with the following search parameters: gap open penalty, 12; and gap extention penalty, 1.

[0030] The subject nucleic acids can be cDNAs or genomic DNAs, as well as fragments thereof, particularly fragments that encode a biologically active gene product and/or are useful in the methods disclosed herein. The term “cDNA” as used herein is intended to include all nucleic acids that share the arrangement of sequence elements found in native mature mRNA species, where sequence elements are exons and 3′ and 5′ non-coding regions. Normally mRNA species have contiguous exons, with the introns, when present, being removed by nuclear RNA splicing, to create a continuous open reading frame encoding a polypeptide of the invention.

[0031] A genomic sequence of interest comprises the nucleic acid present between the initiation codon and the stop codon, as defined in the listed sequences, including all of the introns that are normally present in a native chromosome. It can further include the 3′ and 5′ untranslated regions found in the mature mRNA. It can further include specific transcriptional and translational regulatory sequences, such as promoters, enhancers, etc., including about 1 kb, but possibly more, of flanking genomic DNA at either the 5′ and 3′ end of the transcribed region. The genomic DNA can be isolated as a fragment of 100 kb or smaller; and substantially free of flanking chromosomal sequence. The genomic DNA flanking the coding region, either 3′ and 5′, or internal regulatory sequences as sometimes found in introns, contains sequences required for expression.

[0032] The nucleic acid compositions of the subject invention can encode all or a part of the subject expressed polypeptides. Double or single stranded fragments can be obtained from the DNA sequence by chemically synthesizing oligonucleotides in accordance with conventional methods, by restriction enzyme digestion, by PCR amplification, etc. Isolated nucleic acids and nucleic acid fragments of the invention comprise at least about 15 up to about 100 contiguous nucleotides, or up to the complete sequence provided in SEQ ID NOS:1-999. For the most part, fragments will be of at least 15 nt, usually at least 18 nt or 25 nt, and up to at least about 50 contiguous nt in length or more.

[0033] Probes specific to the nucleic acids of the invention can be generated using the nucleic acid sequences disclosed in SEQ ID NOS:1-999 and the fragments as described above. The probes can be synthesized chemically or can be generated from longer nucleic acids using restriction enzymes. The probes can be labeled, for example, with a radioactive, biotinylated, or fluorescent tag. Preferably, probes are designed based upon an identifying sequence of a nucleic acid of one of SEQ ID NOS:1-999. More preferably, probes are designed based on a contiguous sequence of one of the subject nucleic acids that remain unmasked following application of a masking program for masking low complexity (e.g., XBLAST) to the sequence., i.e. one would select an unmasked region, as indicated by the nucleic acids outside the poly-n stretches of the masked sequence produced by the masking program.

[0034] The nucleic acids of the subject invention are isolated and obtained in substantial purity, generally as other than an intact chromosome. Usually, the nucleic acids, either as DNA or RNA, will be obtained substantially free of other naturally-occurring nucleic acid sequences, generally being at least about 50%, usually at least about 90% pure and are typically “recombinant”, e.g., flanked by one or more nucleotides with which it is not normally associated on a naturally occurring chromosome.

[0035] The nucleic acids of the invention can be provided as a linear molecule or within a circular molecule. They can be provided within autonomously replicating molecules (vectors) or within molecules without replication sequences. They can be regulated by their own or by other regulatory sequences, as is known in the art. The nucleic acids of the invention can be introduced into suitable host cells using a variety of techniques which are available in the art, such as transferrin polycation-mediated DNA transfer, transfection with naked or encapsulated nucleic acids, liposome-mediated DNA transfer, intracellular transportation of DNA-coated latex beads, protoplast fusion, viral infection, electroporation, gene gun, calcium phosphate-mediated transfection, and the like.

[0036] The subject nucleic acid compositions can be used to, for example, produce polypeptides, as probes for the detection of mRNA of the invention in biological samples, e.g. extracts of cells, to generate additional copies of the nucleic acids, to generate ribozymes or antisense oligonucleotides, and as single stranded DNA probes or as triple-strand forming oligonucleotides. The probes described herein can be used to, for example, determine the presence or absence of the nucleic acid sequences as shown in SEQ ID NOS:1-999 or variants thereof in a sample. These and other uses are described in more detail below.

### USE OF NUCLEIC ACIDS AS CODING SEQUENCES

[0037] Naturally occurring Arabidopsis polypeptides or fragments thereof are encoded by the provided nucleic acids. Methods are known in the art to determine whether the complete native protein is encoded by a candidate nucleic acid sequence. Where the provided sequence encodes a fragment of a polypeptide, methods known in the art may be used to determine the remaining sequence. These approaches may utilize a bioinformatics approach, a cloning approach, extension of mRNA species, etc.

[0038] Substantial genomic sequence is available for Arabidopsis, and may be exploited for determining the complete coding sequence corresponding to the provided sequences. The region of the chromosome to which a given sequence is located may be determined by hybridization or by database searching. The genomic sequence is then searched upstream and downstream for the presence of intron/exon boundaries, and for motifs characteristic of transcriptional start and stop sequences, for example by using Genscan (Burge and Karlin (1997) J. Mol. Biol. 268:78-94); or GRAIL (Uberbacher and Mural (1991) P.N.A.S. 88:11261-1265).

[0039] Alternatively, nucleic acid having a sequence of one of SEQ ID NOS:1-999, or an identifying fragment thereof, is used as a hybridization probe to complementary molecules in a cDNA library using probe design methods, cloning methods, and clone selection techniques as known in the art. Libraries of cDNA are made from selected cells. The cells may be those of A. thaliana, or of related species. In some cases it will be desirable to select cells from a particular stage, e.g. seeds, leaves, infected cells, etc.

[0040] Techniques for producing and probing nucleic acid sequence libraries are described, for example, in Sambrook et al., Molecular Cloning: A Laboratory Manual, 2^{nd} Ed., (1989) Cold Spring Harbor Press, Cold Spring Harbor, N.Y.; and Current Protocols in Molecular Biology, (1987 and updates) Ausubel et al., eds. The cDNA can be prepared by using primers based on sequence from SEQ ID NOS:1-999. In one embodiment, the cDNA library can be made from only poly-adenylated mRNA. Thus, poly-T primers can be used to prepare cDNA from the mRNA.

[0041] Members of the library that are larger than the provided nucleic acids, and preferably that encompass the complete coding sequence of the native message, are obtained. In order to confirm that the entire cDNA has been obtained, RNA protection experiments are performed as follows. Hybridization of a full-length cDNA to an mRNA will protect the RNA from RNase degradation. If the cDNA is not full length, then the portions of the mRNA that are not hybridized will be subject to RNase degradation. This is assayed, as is known in the art, by changes in electrophoretic mobility on polyacrylamide gels, or by detection of released monoribonucleotides. Sambrook et al., Molecular Cloning: A Laboratory Manual, 2^{nd} Ed., (1989) Cold Spring Harbor Press, Cold Spring Harbor, N.Y. In order to obtain additional sequences 5′ to the end of a partial cDNA, 5′ RACE (PCR Protocols: A Guide to Methods and Applications, (1990) Academic Press, Inc.) may be performed.

[0042] Genomic DNA is isolated using the provided nucleic acids in a manner similar to the isolation of full-length cDNAs. Briefly, the provided nucleic acids, or portions thereof, are used as probes to libraries of genomic DNA. Preferably, the library is obtained from the cell type that was used to generate the nucleic acids of the invention, but this is not essential. Such libraries can be in vectors suitable for carrying large segments of a genome, such as P1 or YAC, as described in detail in Sambrook et al., 9.4-9.30. In order to obtain additional 5′ or 3′ sequences, chromosome walking is performed, as described in Sambrook et al., such that adjacent and overlapping fragments of genomic DNA are isolated. These are mapped and pieced together, as is known in the art, using restriction digestion enzymes and DNA ligase.

[0043] PCR methods may be used to amplify the members of a cDNA library that comprise the desired insert. In this case, the desired insert will contain sequence from the full length cDNA that corresponds to the instant nucleic acids. Such PCR methods include gene trapping and RACE methods. Gene trapping entails inserting a member of a cDNA library into a vector. The vector then is denatured to produce single stranded molecules. Next, a substrate-bound probe, such a biotinylated oligo, is used to trap cDNA inserts of interest. Biotinylated probes can be linked to an avidin-bound solid substrate. PCR methods can be used to amplify the trapped cDNA. To trap sequences corresponding to the full length genes, the labeled probe sequence is based on the nucleic acid sequences of the invention. Random primers or primers specific to the library vector can be used to amplify the trapped cDNA. Such gene trapping techniques are described in Gruber et al., WO 95/04745 and Gruber et al., U.S. Pat. No. 5,500,356. Kits are commercially available to perform gene trapping experiments from, for example, Life Technologies, Gaithersburg, Md., USA.

[0044] “Rapid amplification of cDNA ends”, or RACE, is a PCR method of amplifying cDNAs from a number of different RNAs. The cDNAs are ligated to an oligonucleotide linker, and amplified by PCR using two primers. One primer is based on sequence from the instant nucleic acids, for which full length sequence is desired, and a second primer comprises sequence that hybridizes to the oligonucleotide linker to amplify the cDNA. A description of this methods is reported in WO 97/19110. A common primer may be designed to anneal to an arbitrary adaptor sequence ligated to cDNA ends. When a single gene-specific RACE primer is paired with the common primer, preferential amplification of sequences between the single gene specific primer and the common primer occurs. Commercial cDNA pools modified for use in RACE are available.

[0045] Once the full-length cDNA or gene is obtained, DNA encoding variants can be prepared by site-directed mutagenesis, described in detail in Sambrook et al., 15.3-15.63. The choice of codon or nucleotide to be replaced can be based on disclosure herein on optional changes in amino acids to achieve altered protein structure and/or function. As an alternative method to obtaining DNA or RNA from a biological material, nucleic acid comprising nucleotides having the sequence of one or more nucleic acids of the invention can be synthesized.

### EXPRESSION OF POLYPEPTIDES

[0046] The provided nucleic acid, e.g. a nucleic acid having a sequence of one of SEQ ID NOS:1-999), the corresponding cDNA, the polypeptide coding sequence as described above, or the full-length gene is used to express a partial or complete gene product. Constructs of nucleic acids having sequences of SEQ ID NOS:1-999 can be generated by recombinant methods, synthetically, or in a single-step assembly of a gene and entire plasmid from large numbers of oligodeoxyribonucleotides is described by, e.g. Stemmer et al., Gene (Amsterdam) (1995) 164(1):49-53.

[0047] Appropriate nucleic acid constructs are purified using standard recombinant DNA techniques as described in, for example, Sambrook et al., Molecular Cloning: A Laboratory Manual, 2^{nd} Ed., (1989) Cold Spring Harbor Press, Cold Spring Harbor, N.Y. The gene product encoded by a nucleic acid of the invention is expressed in any expression system, including, for example, bacterial, yeast, insect, amphibian and mammalian systems.

[0048] The subject nucleic acid molecules are generally propagated by placing the molecule in a vector. Viral and non-viral vectors are used, including plasmids. The choice of plasmid will depend on the type of cell in which propagation is desired and the purpose of propagation. Certain vectors are useful for amplifying and making large amounts of the desired DNA sequence. Other vectors are suitable for expression in cells in culture. Still other vectors are suitable for transfer and expression in cells in a whole organism or person. The choice of appropriate vector is well within the skill of the art. Many such vectors are available commercially.

[0049] The nucleic acids set forth in SEQ ID NOS:1-999 or their corresponding full-length nucleic acids are linked to regulatory sequences as appropriate to obtain the desired expression properties. These can include promoters attached either at the 5′ end of the sense strand or at the 3′ end of the antisense strand, enhancers, terminators, operators, repressors, and inducers. The promoters can be regulated or constitutive. In some situations it may be desirable to use conditionally active promoters, such as tissue-specific or developmental stage-specific promoters. These are linked to the desired nucleotide sequence using the techniques described above for linkage to vectors. Any techniques known in the art can be used.

[0050] When any of the above host cells, or other appropriate host cells or organisms, are used to replicate and/or express the nucleic acids or nucleic acids of the invention, the resulting replicated nucleic acid, RNA, expressed protein or polypeptide, is within the scope of the invention as a product of the host cell or organism. The product is recovered by any appropriate means known in the art.

### IDENTIFICATION OF FUNCTIONAL AND STRUCTURAL MOTIFS

[0051] Translations of the nucleotide sequence of the provided nucleic acids, cDNAs or full genes can be aligned with individual known sequences. Similarity with individual sequences can be used to determine the activity of the polypeptides encoded by the nucleic acids of the invention. Also, sequences exhibiting similarity with more than one individual sequence can exhibit activities that are characteristic of either or both individual sequences.

[0052] The six possible reading frames may be translated using programs such as GCG pepdata, or GCG Frames (Wisconsin Package Version 10.0, Genetics Computer Group (GCG), Madison, Wis., USA. ). Programs such as ORFFinder (National Center for Biotechnology Information (NCBI) a division of the National Library of Medicine (NLM) at the National Institutes of Health (NIH) http://www.ncbi.nlm.nih.gov/) may be used to identify open reading frames (ORFs) in sequences. ORF finder identifies all possible ORFs in a DNA sequence by locating the standard and alternative stop and start codons. Other ORF identification programs include Genie (Kulp et al. (1996).

[0053] A generalized Hidden Markov Model may be used for the recognition of genes in DNA. (ISMB-96, St. Louis, Mo., AAAI/MIT Press; Reese et al. (1997), “Improved splice site detection in Genie”. Proceedings of the First Annual International Conference on Computational Molecular Biology RECOMB 1997, Santa Fe, N.M., ACM Press, New York., P. 34.); BESTORF—Prediction of potential coding fragment in human or plant EST/mRNA sequence data using Markov Chain Models; and FGENEP—Multiple genes structure prediction in plant genomic DNA (Solovyev et al. (1995) Identification of human gene structure using linear discriminant functions and dynamic programming. In Proceedings of the Third International Conference on Intelligent Systems for Molecular Biology eds. Rawling et a. Cambridge, England, AAAI Press,367-375.; Solovyev et al. (1994) Nucl. Acids Res. 22(24):5156-5163; Solovyev et al,. The prediction of human exons by oligonucleotide composition and discriminant analysis of spliceable open reading frames, in: The Second International conference on Intelligent systems for Molecular Biology (eds. Altman et al.), AAAI Press, Menlo Park, Calif. (1994, 354-362) Solovyev and Lawrence, Prediction of human gene structure using dynamic programming and oligonucleotide composition, In: Abstracts of the 4th annual Keck symposium. Pittsburgh, 47,1993; Burge and Karlin (1997) J. Mol. Biol. 268:78-94; Kulp et al. (1996) Proc. Conf. on Intelligent Systems in Molecular Biology '96, 134-142).

[0054] The full length sequences and fragments of the nucleic acid sequences of the nearest neighbors can be used as probes and primers to identify and isolate the full length sequence corresponding to provided nucleic acids. Typically, a selected nucleic acid is translated in all six frames to determine the best alignment with the individual sequences. These amino acid sequences are referred to, generally, as query sequences, which are aligned with the individual sequences. Suitable databases include Genbank, EMBL, and DNA Database of Japan (DDBJ).

[0055] Query and individual sequences can be aligned using the methods and computer programs described above, and include BLAST, available by ftp at ftp://ncbi.nim.nih.gov/.

[0056] Gapped BLAST and PSI-BLAST are useful search tools provided by NCBI. (version 2.0) (Altschul et al., 1997). Position-Specific Iterated BLAST (PSI-BLAST) provides an automated, easy-to-use version of a “profile” search, which is a sensitive way to look for sequence homologues. The program first performs a gapped BLAST database search. The PSI-BLAST program uses the information from any significant alignments returned to construct a position-specific score matrix, which replaces the query sequence for the next round of database searching. PSI-BLAST may be iterated until no new significant alignments are found. The Gapped BLAST algorithm allows gaps (deletions and insertions) to be introduced into the alignments that are returned. Allowing gaps means that similar regions are not broken into several segments. The scoring of these gapped alignments tends to reflect biological relationships more closely. The Smith-Waterman is another algorithm that produces local or global gapped sequence alignments, see Meth. Mol. Biol. (1997) 70: 173-187. Also, the GAP program using the Needleman and Wunsch global alignment method can be utilized for sequence alignments.

[0057] Results of individual and query sequence alignments can be divided into three categories, high similarity, weak similarity, and no similarity. Individual alignment results ranging from high similarity to weak similarity provide a basis for determining polypeptide activity and/or structure. Parameters for categorizing individual results include: percentage of the alignment region length where the strongest alignment is found, percent sequence identity, and e value.

[0058] The percentage of the alignment region length is calculated by counting the number of residues of the individual sequence found in the region of strongest alignment, e.g. contiguous region of the individual sequence that contains the greatest number of residues that are identical to the residues of the corresponding region of the aligned query sequence. This number is divided by the total residue length of the query sequence to calculate a percentage. For example, a query sequence of 20 amino acid residues might be aligned with a 20 amino acid region of an individual sequence. The individual sequence might be identical to amino acid residues 5, 9-15, and 17-19 of the query sequence. The region of strongest alignment is thus the region stretching from residue 9-19, an 11 amino acid stretch. The percentage of the alignment region length is: 11 (length of the region of strongest alignment) divided by (query sequence length) 20 or 55%.

[0059] Percent sequence identity is calculated by counting the number of amino acid matches between the query and individual sequence and dividing total number of matches by the number of residues of the individual sequences found in the region of strongest alignment. Thus, the percent identity in the example above would be 10 matches divided by 11 amino acids, or approximately, 90.9%

[0060] E value is the probability that the alignment was produced by chance. For a single alignment, the e value can be calculated according to Karlin et al., Proc. Natl. Acad. Sci. (1990) 87:2264 and Karlin et al., Proc. Natl. Acad. Sci. (1993) 90. The e value of multiple alignments using the same query sequence can be calculated using an heuristic approach described in Altschul et al., Nat. Genet. (1994) 6:119. Alignment programs such as BLAST program can calculate the e value.

[0061] Another factor to consider for determining identity or similarity is the location of the similarity or identity. Strong local alignment can indicate similarity even if the length of alignment is short. Sequence identity scattered throughout the length of the query sequence also can indicate a similarity between the query and profile sequences. The boundaries of the region where the sequences align can be determined according to Doolittle, supra; BLAST or FASTA programs; or by determining the area where sequence identity is highest.

[0062] In general, in alignment results considered to be of high similarity, the percent of the alignment region length is typically at least about 55% of total length query sequence; more typically, at least about 58%; even more typically; at least about 60% of the total residue length of the query sequence. Usually, percent length of the alignment region can be as much as about 62%; more usually, as much as about 64%; even more usually, as much as about 66%. Further, for high similarity, the region of alignment, typically, exhibits at least about 75% of sequence identity; more typically, at least about 78%; even more typically; at least about 80% sequence identity. Usually, percent sequence identity can be as much as about 82%; more usually, as much as about 84%; even more usually, as much as about 86%.

[0063] The p value is used in conjunction with these methods. The query sequence is considered to have a high similarity with a profile sequence when the p value is less than or equal to 10⁻². Confidence in the degree of similarity between the query sequence and the profile sequence increases as the p value become smaller.

[0064] In general, where alignment results considered to be of weak similarity, there is no minimum percent length of the alignment region nor minimum length of alignment. A better showing of weak similarity is considered when the region of alignment is, typically, at least about 15 amino acid residues in length; more typically, at least about 20; even more typically; at least about 25 amino acid residues in length. Usually, length of the alignment region can be as much as about 30 amino acid residues; more usually, as much as about 40; even more usually, as much as about 60 amino acid residues. Further, for weak similarity, the region of alignment, typically, exhibits at least about 35% of sequence identity; more typically, at least about 40%; even more typically; at least about 45% sequence identity. Usually, percent sequence identity can be as much as about 50%; more usually, as much as about 55%; even more usually, as much as about 60%.

[0065] The query sequence is considered to have a low similarity with a profile sequence when the p value is greater than 10⁻². Confidence in the degree of similarity between the query sequence and the profile sequence decreases as the p values become larger.

[0066] Sequence identity alone can be used to determine similarity of a query sequence to an individual sequence and can indicate the activity of the sequence. Such an alignment, preferably, permits gaps to align sequences. Typically, the query sequence is related to the profile sequence if the sequence identity over the entire query sequence is at least about 15%; more typically, at least about 20%; even more typically, at least about 25%; even more typically, at least about 50%. Sequence identity alone as a measure of similarity is most useful when the query sequence is usually, at least 80 residues in length; more usually, 90 residues; even more usually, at least 95 amino acid residues in length. More typically, similarity can be concluded based on sequence identity alone when the query sequence is preferably 100 residues in length; more preferably, 120 residues in length; even more preferably, 150 amino acid residues in length.

[0067] It is apparent, when studying protein sequence families, that some regions have been better conserved than others during evolution. These regions are generally important for the function of a protein and/or for the maintenance of its three-dimensional structure. By analyzing the constant and variable properties of such groups of similar sequences, it is possible to derive a signature for a protein family or domain, which distinguishes its members from all other unrelated proteins. A pertinent analogy is the use of fingerprints by the police for identification purposes. A fingerprint is generally sufficient to identify a given individual. Similarly, a protein signature can be used to assign a new sequence to a specific family of proteins and thus to formulate hypotheses about its function. The PROSITE database is a compendium of such fingerprints (motifs) and may be used with search software such as Wisconsin GCG Motifs to find motifs or fingerprints in query sequences. PROSITE currently contains signatures specific for about a thousand protein families or domains. Each of these signatures comes with documentation providing background information on the structure and function of these proteins (Hofmann et al. (1999) Nucleic Acids Res. 27:215-219; Bucher and Bairoch., A generalized profile syntax for biomolecular sequences motifs and its function in automatic sequence interpretation (In) ISMB-94; Proceedings 2nd International Conference on Intelligent Systems for Molecular Biology; Altman et al. Eds. (1994), pp 53-61, AAAI Press, Menlo Park).

[0068] Translations of the provided nucleic acids can be aligned with amino acid profiles that define either protein families or common motifs. Also, translations of the provided nucleic acids can be aligned to multiple sequence alignments (MSA) comprising the polypeptide sequences of members of protein families or motifs. Similarity or identity with profile sequences or MSAs can be used to determine the activity of the gene products (e.g., polypeptides) encoded by the provided nucleic acids or corresponding cDNA or genes.

[0069] Profiles can designed manually by (1) creating an MSA, which is an alignment of the amino acid sequence of members that belong to the family and (2) constructing a statistical representation of the alignment. Such methods are described, for example, in Birney et al., Nucl. Acid Res. (1996) 24(14): 2730-2739. MSAs of some protein families and motifs are available for downloading to a local server. For example, the PFAM database with MSAs of 547 different families and motifs, and the software (HMMER) to search the PFAM database may be downloaded from ftp://ftp.genetics.wustl.edu/pub/eddy/pfam-4.4/ to allow secure searches on a local server. Pfam is a database of multiple alignments of protein domains or conserved protein regions., which represent evolutionary conserved structure that has implications for the protein's function (Sonnhammer et al. (1998) Nucl. Acid Res. 26:320-322; Bateman et a. (1999) Nucleic Acids Res. 27:260-262).

[0070] The 3D_ali databank (Pasarella, S. and Argos, P. (1992) Prot. Engineering 5:121-137) was constructed to incorporate new protein structural and sequence data. The databank has proved useful in many research fields such as protein sequence and structure analysis and comparison, protein folding, engineering and design and evolution. The collection enhances present protein structural knowledge by merging information from proteins of similar main-chain fold with homologous primary structures taken from large databases of all known sequences. 3D_ali databank files may be downloaded to a secure local server from http://www.embl-heidelberg.de/argos/ali/ali_form.html.

[0071] The identify and function of the gene that correlates to a nucleic acid described herein can be determined by screening the nucleic acids or their corresponding amino acid sequences against profiles of protein families. Such profiles focus on common structural motifs among proteins of each family. Publicly available profiles are known in the art.

[0072] In comparing a novel nucleic acid with known sequences, several alignment tools are available. Examples include PileUp, which creates a multiple sequence alignment, and is described in Feng et al., J. Mol. Evol. (1987) 25:351. Another method, GAP, uses the alignment method of Needleman et al., J. Mol. Biol. (1970) 48:443. GAP is best suited for global alignment of sequences. A third method, BestFit, functions by inserting gaps to maximize the number of matches using the local homology algorithm of Smith et a. (1981) Adv. Appl. Math. 2:482.

### IDENTIFICATION OF SECRETED & MEMBRANE-BOUND POLYPEPTIDES

[0073] Secreted and membrane-bound polypeptides of the present invention are of interest. Because both secreted and membrane-bound polypeptides comprise a fragment of contiguous hydrophobic amino acids, hydrophobicity predicting algorithms can be used to identify such polypeptides. A signal sequence is usually encoded by both secreted and membrane-bound polypeptide genes to direct a polypeptide to the surface of the cell. The signal sequence usually comprises a stretch of hydrophobic residues. Such signal sequences can fold into helical structures. Membrane-bound polypeptides typically comprise at least one transmembrane region that possesses a stretch of hydrophobic amino acids that can transverse the membrane. Some transmembrane regions also exhibit a helical structure. Hydrophobic fragments within a polypeptide can be identified by using computer algorithms. Such algorithms include Hopp & Woods, Proc. Natl. Acad. Sci. USA (1981) 78:3824-3828; Kyte & Doolittle, J. Mol. Biol. (1982) 157: 105-132; and RAOAR algorithm, Degli Esposti et al., Eur. J. Biochem. (1990) 190: 207-219.

[0074] Another method of identifying secreted and membrane-bound polypeptides is to translate the nucleic acids of the invention in all six frames and determine if at least 8 contiguous hydrophobic amino acids are present. Those translated polypeptides with at least 8; more typically, 10; even more typically, 12 contiguous hydrophobic amino acids are considered to be either a putative secreted or membrane bound polypeptide. Hydrophobic amino acids include alanine, glycine, histidine, isoleucine, leucine, lysine, methionine, phenylalanine, proline, threonine, tryptophan, tyrosine, and valine.

### IDENTIFICATION OF THE FUNCTION OF AN EXPRESSION PRODUCT

[0075] The biological function of the encoded gene product of the invention may be determined by empirical or deductive methods. One promising avenue, termed phylogenomics, exploits the use of evolutionary information to facilitate assignment of gene function. The approach is based on the idea that functional predictions can be greatly improved by focusing on how genes became similar in sequence during evolution instead of focusing on the sequence similarity itself. One of the major efficiencies that has emerged from plant genome research to date is that a large percentage of higher plant genes can be assigned some degree of function by comparing them with the sequences of genes of known function.

[0076] Alternatively, “reverse genetics” is used to identify gene function. Large collections of insertion mutants are available for Arabidopsis, maize, petunia, and snapdragon. These collections can be screened for an insertional inactivation of any gene by using the polymerase chain reaction (PCR) primed with oligonucleotides based on the sequences of the target gene and the insertional mutagen. The presence of an insertion in the target gene is indicated by the presence of a PCR product. By multiplexing DNA samples, hundreds of thousands of lines can be screened and the corresponding mutant plants can be identified with relatively small effort. Analysis of the phenotype and other properties of the corresponding mutant will provide an insight into the function of the gene.

[0077] In one method of the invention, the gene function in a transgenic Arabidopsis plant is assessed with anti-sense constructs. A high degree of gene duplication is apparent in Arabidopsis, andmany of the gene duplications in Arabidopsis are very tightly linked. Large numbers of transgenic Arabidopsis plants can be generated by infecting flowers with Agrobacterium tumefaciens containing an insertional mutagen, a method of gene silencing based on producing double-stranded RNA from bidirectional transcription of genes in transgenic plants can be broadly useful for high-throughput gene inactivation (Clough and Bent (1999) Plant J. 17; Waterhouse et al. (1998) Proc. Natl. Acad. Sci. U.S.A. 95:13959). This method may use promoters that are expressed in only a few cell types or at a particular developmental stage or in response to an external stimulus. This could significantly obviate problems associated with the lethality of some mutations.

[0078] Virus-induced gene silencing may also find use for suppressing gene function. This method exploits the fact that some or all plants have a surveillance system that can specifically recognize viral nucleic acids and mount a sequence-specific suppression of viral RNA accumulation. By inoculating plants with a recombinant virus containing part of a plant gene, it is possible to rapidly silence the endogenous plant gene.

[0079] Antisense nucleic acids are designed to specifically bind to RNA, resulting in the formation of RNA-DNA or RNA-RNA hybrids, with an arrest of DNA replication, reverse transcription or messenger RNA translation. Antisense nucleic acids based on a selected nucleic acid sequence can interfere with expression of the corresponding gene. Antisense nucleic acids are typically generated within the cell by expression from antisense constructs that contain the antisense strand as the transcribed strand. Antisense nucleic acids based on the disclosed nucleic acids will bind and/or interfere with the translation of mRNA comprising a sequence complementary to the antisense nucleic acid. The expression products of control cells and cells treated with the antisense construct are compared to detect the protein product of the gene corresponding to the nucleic acid upon which the antisense construct is based. The protein is isolated and identified using routine biochemical methods.

[0080] As an alternative method for identifying function of the gene corresponding to a nucleic acid disclosed herein, dominant negative mutations are readily generated for corresponding proteins that are active as homomultimers. A mutant polypeptide will interact with wild-type polypeptides (made from the other allele) and form a non-functional multimer. Thus, a mutation is in a substrate-binding domain, a catalytic domain, or a cellular localization domain. Preferably, the mutant polypeptide will be overproduced. Point mutations are made that have such an effect. In addition, fusion of different polypeptides of various lengths to the terminus of a protein can yield dominant negative mutants. General strategies are available for making dominant negative mutants (see for example, Herskowitz (1987) Nature 329:219). Such techniques can be used to create loss of function mutations, which are useful for determining protein function.

[0081] Another approach for discovering the function of genes utilizes gene chips and microarrays. DNA sequences representing all the genes in an organism can be placed on miniature solid supports and used as hybridization substrates to quantitate the expression of all the genes represented in a complex mRNA sample. This information is used to provide extensive databases of quantitative information about the degree to which each gene responds to pathogens, pests, drought, cold, salt, photoperiod, and other environmental variation. Similarly, one obtains extensive information about which genes respond to changes in developmental processes such as germination and flowering. One can therefore determine which genes respond to the phytohormones, growth regulators, safeners, herbicides, and related agrichemicals. These databases of gene expression information provide insights into the “pathways” of genes that control complex responses. The accumulation of DNA microarray or gene chip data from many different experiments creates a powerful opportunity to assign functional information to genes of otherwise unknown function. The conceptual basis of the approach is that genes that contribute to the same biological process will exhibit similar patterns of expression. Thus, by clustering genes based on the similarity of their relative levels of expression in response to diverse stimuli or developmental or environmental conditions, it is possible to assign functions to many genes based on the known function of other genes in the cluster.

### CONSTRUCTION OF POLYPEPTIDES OF THE INVENTION AND VARIANTS THEREOF

[0082] The polypeptides of the invention include those encoded by the disclosed nucleic acids. These polypeptides can also be encoded by nucleic acids that, by virtue of the degeneracy of the genetic code, are not identical in sequence to the disclosed nucleic acids. Thus, the invention includes within its scope a polypeptide encoded by a nucleic acid having the sequence of any one of SEQ ID NOS: 1-999 or a variant thereof.

[0083] In general, the term “polypeptide” as used herein refers to both the full length polypeptide encoded by the recited nucleic acid, the polypeptide encoded by the gene represented by the recited nucleic acid, as well as portions or fragments thereof. “Polypeptides” also includes variants of the naturally occurring proteins, where such variants are homologous or substantially similar to the naturally occurring protein, and can be of an origin of the same or different species as the naturally occurring protein. In general, variant polypeptides have a sequence that has at least about 80%, usually at least about 90%, and more usually at least about 98% sequence identity with a differentially expressed polypeptide of the invention, as measured by BLAST using the parameters described above. The variant polypeptides can be naturally or non-naturally glycosylated, i.e., the polypeptide has a glycosylation pattern that differs from the glycosylation pattern found in the corresponding naturally occurring protein.

[0084] In general, the polypeptides of the subject invention are provided in a non-naturally occurring environment, e.g. are separated from their naturally occurring environment. In certain embodiments, the subject protein is present in a composition that is enriched for the protein as compared to a control. As such, purified polypeptide is provided, where by purified is meant that the protein is present in a composition that is substantially free of non-differentially expressed polypeptides, where by substantially free is meant that less than 90%, usually less than 60% and more usually less than 50% of the composition is made up of non-differentially expressed polypeptides.

[0085] Also within the scope of the invention are variants; variants of polypeptides include mutants, fragments, and fusions. Mutants can include amino acid substitutions, additions or deletions. The amino acid substitutions can be conservative amino acid substitutions or substitutions to eliminate non-essential amino acids, such as to alter a glycosylation site, a phosphorylation site or an acetylation site, or to minimize misfolding by substitution or deletion of one or more cysteine residues that are not necessary for function. Conservative amino acid substitutions are those that preserve the general charge, hydrophobicity/hydrophilicity, and/or steric bulk of the amino acid substituted.

[0086] Variants also include fragments of the polypeptides disclosed herein, particularly biologically active fragments and/or fragments corresponding to functional domains. Fragments of interest will typically be at least about 10 amino acids (aa) to at least about 15 aa in length, usually at least about 50 aa in length, and can be as long as 300 aa in length or longer, but will usually not exceed about 1000 aa in length, where the fragment will have a stretch of amino acids that is identical to a polypeptide encoded by a nucleic acid having a sequence of any SEQ ID NOS:1-999, or a homolog thereof.

[0087] The protein variants described herein are encoded by nucleic acids that are within the scope of the invention. The genetic code can be used to select the appropriate codons to construct the corresponding variants.

### LIBRARIES AND ARRAYS

[0088] In general, a library of biopolymers is a collection of sequence information, which information is provided in either biochemical form (e.g., as a collection of nucleic acid or polypeptide molecules), or in electronic form (e.g., as a collection of genetic sequences stored in a computer-readable form, as in a computer system and/or as part of a computer program). The term biopolymer, as used herein, is intended to refer to polypeptides, nucleic acids, and derivatives thereof, which molecules are characterized by the possession of genetic sequences either corresponding to, or encoded by, the sequences set forth in the provided sequence list (seqlist). The sequence information can be used in a variety of ways, e.g., as a resource for gene discovery, as a representation of sequences expressed in a selected cell type, e.g. cell type markers, etc.

[0089] The nucleic acid libraries of the subject invention include sequence information of a plurality of nucleic acid sequences, where at least one of the nucleic acids has a sequence of any of SEQ ID NOS:1-999. By plurality is meant one or more, usually at least 2 and can include up to all of SEQ ID NOS:1-999. The length and number of nucleic acids in the library will vary with the nature of the library, e.g., if the library is an oligonucleotide array, a cDNA array, a computer database of the sequence information, etc.

[0090] Where the library is an electronic library, the nucleic acid sequence information can be present in a variety of media. “Media” refers to a manufacture, other than an isolated nucleic acid molecule, that contains the sequence information of the present invention. Such a manufacture provides the sequences or a subset thereof in a form that can be examined by means not directly applicable to the sequence as it exists in a nucleic acid. For example, the nucleotide sequence of the present invention, e.g. the nucleic acid sequences of any of the nucleic acids of SEQ ID NOS:1-999, can be recorded on computer readable media, e.g. any medium that can be read and accessed directly by a computer. Such media include, but are not limited to: magnetic storage media, such as a floppy disc, a hard disc storage medium, and a magnetic tape; optical storage media such as CD-ROM; electrical storage media such as RAM and ROM; and hybrids of these categories such as magnetic/optical storage media. One of skill in the art can readily appreciate how any of the presently known computer readable mediums can be used to create a manufacture comprising a recording of the present sequence information. “Recorded” refers to a process for storing information on computer readable medium, using any such methods as known in the art. Any convenient data storage structure can be chosen, based on the means used to access the stored information. A variety of data processor programs and formats can be used for storage, e.g. word processing text file, database format, etc. In addition to the sequence information, electronic versions of the libraries of the invention can be provided in conjunction or connection with other computer-readable information and/or other types of computer-readable files (e.g., searchable files, executable files, etc, including, but not limited to, for example, search program software, etc.)

[0091] By providing the nucleotide sequence in computer readable form, the information can be accessed for a variety of purposes. Computer software to access sequence information is publicly available. For example, the BLAST (Altschul et al., supra.) and BLAZE (Brutlag et al. Comp. Chem. (1993) 17:203) search algorithms on a Sybase system can be used identify open reading frames (ORFs) within the genome that contain homology to ORFs from other organisms.

[0092] As used herein, “a computer-based system” refers to the hardware means, software means, and data storage means used to analyze the nucleotide sequence information of the present invention. The minimum hardware of the computer-based systems of the present invention comprises a central processing unit (CPU), input means, output means, and data storage means. A skilled artisan can readily appreciate that any one of the currently available computer-based system are suitable for use in the present invention. The data storage means can comprise any manufacture comprising a recording of the present sequence information as described above, or a memory access means that can access such a manufacture.

[0093] “Search means” refers to one or more programs implemented on the computer-based system, to compare a target sequence or target structural motif with the stored sequence information. Search means are used to identify fragments or regions of the genome that match a particular target sequence or target motif. A variety of known algorithms are publicly known and commercially available, e.g. MacPattern (EMBL), BLASTN, BLASTX (NCBI) and tBLASTX. A “target sequence” can be any DNA or amino acid sequence of six or more nucleotides or two or more amino acids, preferably from about 10 to 100 amino acids or from about 30 to 300 nucleotide residues.

[0094] A “target structural motif,” or “target motif,” refers to any rationally selected sequence or combination of sequences in which the sequence(s) are chosen based on a three-dimensional configuration that is formed upon the folding of the target motif, or on consensus sequences of regulatory or active sites. There are a variety of target motifs known in the art. Protein target motifs include, but arc not limited to, enzyme active sites and signal sequences. Nucleic acid target motifs include, but are not limited to, hairpin structures, promoter sequences and other expression elements such as binding sites for transcription factors.

[0095] A variety of structural formats for the input and output means can be used to input and output the information in the computer-based systems of the present invention. One format for an output means ranks fragments of the genome possessing varying degrees of homology to a target sequence or target motif. Such presentation provides a skilled artisan with a ranking of sequences and identifies the degree of sequence similarity contained in the identified fragment.

[0096] A variety of comparing means can be used to compare a target sequence or target motif with the data storage means to identify sequence fragments of the genome. A skilled artisan can readily recognize that any one of the publicly available homology search programs can be used as the search means for the computer based systems of the present invention.

[0097] As discussed above, the “library” of the invention also encompasses biochemical libraries of the nucleic acids of SEQ ID NOS:1-999, e.g., collections of nucleic acids representing the provided nucleic acids. The biochemical libraries can take a variety of forms, e.g. a solution of cDNAs, a pattern of probe nucleic acids stably bound to a surface of a solid support (microarray) and the like. By array is meant an article of manufacture that has a solid support or substrate with one or more nucleic acid targets on one of its surfaces, where the number of distinct nucleic may be in the hundreds, thousand, or tens of thousands. Each nucleic acid will comprise at 18 nt and often at least 25 nt, and often at least 100 to 1000 nucleotides, and may represent up to a complete coding sequence or cDNA. A variety of different array formats have been developed and are known to those of skill in the art. The arrays of the subject invention find use in a variety of applications, including gene expression analysis, drug screening, mutation analysis and the like, as disclosed in the above-listed exemplary patent documents.

[0098] In addition to the above nucleic acid libraries, analogous libraries of polypeptides are also provided, where the where the polypeptides of the library will represent at least a portion of the polypeptides encoded by SEQ ID NOS:1-999.

### GENETICALLY ALTERED CELLS AND TRANSGENICS

[0099] The subject nucleic acids can be used to create genetically modified and transgenic organisms, usually plant cells and plants, which may be monocots or dicots. The term transgenic, as used herein, is defined as an organism into which an exogenous nucleic acid construct has been introduced, generally the exogenous sequences are stably maintained in the genome of the organism. Of particular interest are transgenic organisms where the genomic sequence of germ line cells has been stably altered by introduction of an exogenous construct.

[0100] Typically, the transgenic organism is altered in the genetic expression of the introduced nucleotide sequences as compared to the wild-type, or unaltered organism. For example, constructs that provide for over-expression of a targeted sequence, sometimes referred to as a “knock-in”, provide for increased levels of the gene product. Alternatively, expression of the targeted sequence can be down-regulated or substantially eliminated by introduction of a “knock-out” construct, which may direct transcription of an anti-sense RNA that blocks expression of the naturally occurring mRNA, by deletion of the genomic copy of the targeted sequence, etc.

[0101] In one method, large numbers of genes are simultaneously introduced in order to explore the genetic basis of complex traits, for example by making plant artificial chromosome (PLAC) libraries. The centromeres in Arabidopsis have been mapped and current genome sequencing efforts will extend through these regions. Because Arabidopsis telomeres are very similar to those in yeast one may use a hybrid sequence of alternating plant and yeast sequences that function in both types of organisms, developing yeast artificial chromosome-PLAC libraries, and then introducing them into a suitable plant host to evaluate the phenotypic consequences. By providing a defined chromosomal environment for cloned genes, the use of PLACs may also enhance the ability to produce transgenic plants with defined levels of gene expression.

[0102] It has been found in many organisms that there is significant redundancy in the representation of genes in a genome. That is, a particular gene function is likely by represented by multiple copies of similar coding sequences in the genome. These copies are typically conserved in the amino acid sequence, but may diverge in the sequence of non-translated sequences, and in their codon usage. In order to knock out a particular genetic function in an organism, it may not be sufficient to delete a genomic copy of a single gene. In such cases it may be preferable to achieve a genetic knock-out with an anti-sense construct, particularly where the sequence is aligned with the coding portion of the mRNA.

[0103] Methods of transforming plant cells are well-known in the art, and include protoplast transformation, tungsten whiskers (Coffee et al., U.S. Pat. No. 5,302,523, issued Apr. 12, 1994), directly by microorganisms with infectious plasmids, use of transposons (U.S. Pat. No. 5,792,294), infectious viruses, the use of liposomes, microinjection by mechanical or laser beam methods, by whole chromosomes or chromosome fragments, electroporation, silicon carbide fibers, and microprojectile bombardment.

[0104] For example, one may utilize the biolistic bombardment of meristem tissue, at a very early stage of development, and the selective enhancement of transgenic sectors toward genetic homogeneity, in cell layers that contribute to germline transmission. Biolistics-mediated production of fertile, transgenic maize is described in Gordon-Kamm et al. (1990), Plant Cell 2:603; Fromm et al. (1990) Bio/Technology 8: 833, for example. Alternatively, one may use a microorganism, including but not limited to, Agrobacterium tumefaciens as a vector for transforming the cells, particularly where the targeted plant is a dicotyledonous species. See, for example, U.S. Pat. No. 5,635,381. Leung et al. (1990) Curr. Genet. 17(5):409-11 describe integrative transformation of three fertile hermaphroditic strains of Arabidopsis thaliana using plasmids and cosmids that contain an E. coli gene linked to Aspergillus nidulans regulatory sequences.

[0105] Preferred expression cassettes for cereals may include promoters that are known to express exogenous DNAs in corn cells. For example, the Adhl promoter has been shown to be strongly expressed in callus tissue, root tips, and developing kernels in corn. Promoters that are used to express genes in corn include, but are not limited to, a plant promoter such as the, CaMV 35S promoter (Odell et al., Nature, 313, 810 (1985)), or others such as CaMV 19S (Lawton et al., Plant Mol. Biol., 9, 31F (1987)), nos (Ebert et al., PNAS USA, 84, 5745 (1987)), Adh (Walker et al., PNAS USA, 84, 6624 (1987)), sucrose synthase (Yang et al., PNAS USA, 87, 4144 (1990)), .alpha.-tubulin, ubiquitin, actin (Wang et al., Mol. Cell. Biol., 12, 3399 (1992)), cab (Sullivan et al., Mol. Gen. Genet, 215, 431 (1989)), PEPCase (Hudspeth et al., Plant Mol. Biol., 12, 579 (1989)), or those associated with the R gene complex (Chandler et al., The Plant Cell, 1, 1175 (1989)). Other promoters useful in the practice of the invention are known to those of skill in the art.

[0106] Tissue-specific promoters, including but not limited to, root-cell promoters (Conkling et al., Plant Physiol., 93, 1203 (1990)), and tissue-specific enhancers (Fromm et al., The Plant Cell, 1, 977 (1989)) are also contemplated to be particularly useful, as are inducible promoters such as water-stress-, ABA- and turgor-inducible promoters (Guerrero et al., Plant Molecular Biology, 15, 11-26)), and the like.

[0107] Regulating and/or limiting the expression in specific tissues may be functionally accomplished by introducing a constitutively expressed gene (all tissues) in combination with an antisense gene that is expressed only in those tissues where the gene product is not desired. Expression of an antisense transcript of this preselected DNA segment in an rice grain, using, for example, a zein promoter, would prevent accumulation of the gene product in seed. Hence the protein encoded by the preselected DNA would be present in all tissues except the kernel.

[0108] Alternatively, one may wish to obtain novel tissue-specific promoter sequences for use in accordance with the present invention. To achieve this, one may first isolate cDNA clones from the tissue concerned and identify those clones which are expressed specifically in that tissue, for example, using Northern blotting or DNA microarrays. Ideally, one would like to identify a gene that is not present in a high copy number, but which gene product is relatively abundant in specific tissues. The promoter and control elements of corresponding genomic clones may then be localized using the techniques of molecular biology known to those of skill in the art. Alternatively, promoter elements can be identified using enhancer traps based on T-DNA and/or transposon vector systems (see, for example, Campisi et al. (1999) Plant J. 17:699-707; Gu et al. (1998) Development 125:1509-1517).

[0109] In some embodiments of the present invention expression of a DNA segment in a transgenic plant will occur only in a certain time period during the development of the plant. Developmental timing is frequently correlated with tissue specific gene expression. For example, in corn expression of zein storage proteins is initiated in the endosperm about 15 days after pollination.

[0110] Ultimately, the most desirable DNA segments for introduction into a plant genome may be homologous genes or gene families which encode a desired trait (e.g., increased disease resistance) and which are introduced under the control of novel promoters or enhancers, etc., or perhaps even homologous or tissue-specific (e.g., root-,grain- or leaf-specific) promoters or control elements.

[0111] The genetically modified cells are screened for the presence of the introduced genetic material. The cells may be used in functional studies, drug screening, etc., e.g. to study chemical mode of action, to determine the effect of a candidate agent on pathogen growth, infection of plant cells, etc.

[0112] The modified cells are useful in the study of genetic function and regulation, for alteration of the cellular metabolism, and for screening compounds that may affect the biological function of the gene or gene product. For example, a series of small deletions and/or substitutions may be made in the host's native gene to determine the role of different domains and motifs in the biological function. Specific constructs of interest include anti-sense, as previously described, which will reduce or abolish expression, expression of dominant negative mutations, and over-expression of genes.

[0113] Where a sequence is introduced, the introduced sequence may be either a complete or partial sequence of a gene native to the host, or may be a complete or partial sequence that is exogenous to the host organism, e.g., an A. thaliana sequence inserted into wheat plants. A detectable marker, such as aldA, lac Z, etc. may be introduced into the locus of interest, where upregulation of expression will result in an easily detected change in phenotype.

[0114] One may also provide for expression of the gene or variants thereof in cells or tissues where it is not normally expressed, at levels not normally present in such cells or tissues, or at abnormal times of development, during sporulation, etc. By providing expression of the protein in cells in which it is not normally produced, one can induce changes in cell behavior.

[0115] DNA constructs for homologous recombination will comprise at least a portion of the provided gene or of a gene native to the species of the host organism, wherein the gene has the desired genetic modification(s), and includes regions of homology to the target locus (see Kempin et al. (1997) Nature 389:802-803). DNA constructs for random integration or episomal maintenance need not include regions of homology to mediate recombination. Conveniently, markers for positive and negative selection are included. Methods for generating cells having targeted gene modifications through homologous recombination are known in the art.

[0116] Embodiments of the invention provide processes for enhancing or inhibiting synthesis of a protein in a plant by introducing a provided nucleic acids sequence into a plant cell, where the nucleic acid comprises sequences encoding a protein of interest. For example, enhanced resistance to pathogens may be achieved by inserting a nucleic acid encoding an activator in a vector downstream from a promoter sequence capable of driving constitutive high-level expression in a plant cell. When grown into plants, the transgenic plants exhibit increased synthesis of resistance proteins, and increased resistance to pathogens.

[0117] Other embodiments of the invention provide processes for enhancing or inhibiting synthesis of a tolerance factor in a plant by introducing a nucleic acid of the invention into a plant cell, where the nucleic acid comprises sequences encoding a tolerance factor. For example, enhanced tolerance to an environmental stress may be achieved by inserting a nucleic acid encoding an activator in a vector downstream from a promoter sequence capable of driving constitutive high-level expression in a plant cell. When grown into plants, the transgenic plants exhibit increased synthesis of tolerance proteins, and increased tolerance to environmental stress.

[0118] Factors which are involved, directly or indirectly in biosynthetic pathways whose products are of commercial, nutritional, or medicinal value include any factor, usually a protein or peptide, which regulates such a biosynthetic pathway (e.g., an activator or repressor); which is an intermediate in such a biosynthetic pathway; or which is a product that increases the nutritional value of a food product; a medicinal product; or any product of commercial value and/or research interest. Plant and other cells may be genetically modified to enhance a trait of interest, by upregulating or down-regulating factors in a biosynthetic pathway.

### SCREENING ASSAYS

[0119] The polypeptides encoded by the provided nucleic acid sequences, and cells genetically altered to express such sequences, are useful in a variety of screening assays to determine effect of candidate inhibitors, activators., or modifiers of the gene product. One may determine what insecticides, fungicides and the like have an enhancing or synergistic activity with a gene. Alternatively, one may screen for compounds that mimic the activity of the protein. Similarly, the effect of activating agents may be used to screen for compounds that mimic or enhance the activation of proteins. Candidate inhibitors of a particular gene product are screened by detecting decreased from the targeted gene product.

[0120] The screening assays may use purified target macromolecules to screen large compound libraries for inhibitory drugs; or the purified target molecule may be used for a rational drug design program, which requires first determining the structure of the macromolecular target or the structure of the macromolecular target in association with its customary substrate or ligand. This information is then used to design compounds which must be synthesized and tested further. Test results are used to refine the molecular models and drug design process in an iterative fashion until a lead compound emerges.

[0121] Drug screening may be performed using an in vitro model, a genetically altered cell, or purified protein. One can identify ligands or substrates that bind to, modulate or mimic the action of the target genetic sequence or its product. A wide variety of assays may be used for this purpose, including labeled in vitro protein-protein binding assays, electrophoretic mobility shift assays, immunoassays for protein binding, and the like. The purified protein may also be used for determination of three-dimensional crystal structure, which can be used for modeling intermolecular interactions.

[0122] Where the nucleic acid encodes a factor involved in a biosynthetic pathway, as described above, it may be desirable to identify factors, e.g., protein factors, which interact with such factors. One can identify interacting factors, ligands, substrates that bind to, modulate or mimic the action of the target genetic sequence or its product. A wide variety of assays may be used for this purpose, including labeled in vitro protein-protein binding assays, electrophoretic mobility shift assays, immunoassays for protein binding, and the like. In vivo assays for protein-protein interactions in E. coli and yeast cells are also well-established (see Hu et a. (2000) Methods 20:80-94; and Bai and Elledge (1997) Methods Enzymol. 283:141-156).

[0123] The purified protein may also be used for determination of three-dimensional crystal structure, which can be used for modeling intermolecular interactions. It may also be of interest to identify agents that modulate the interaction of a factor identified as described above with a factor encoded by a nucleic acid of the invention. Drug screening can be performed to identify such agents. For example, a labeled in vitro protein-protein binding assay can be used, which is conducted in the presence and absence of an agent being tested.

[0124] The term “agent” as used herein describes any molecule, e.g. protein or pharmaceutical, with the capability of altering or mimicking a physiological function. Generally a plurality of assay mixtures are run in parallel with different agent concentrations to obtain a differential response to the various concentrations. Typically, one of these concentrations serves as a negative control, i.e. at zero concentration or below the level of detection.

[0125] Candidate agents encompass numerous chemical classes, though typically they are organic molecules, preferably small organic compounds having a molecular weight of more than 50 and less than about 2,500 daltons. Candidate agents comprise functional groups necessary for structural interaction with proteins, particularly hydrogen bonding, and typically include at least an amine, carbonyl, hydroxyl or carboxyl group, preferably at least two of the functional chemical groups. The candidate agents often comprise cyclical carbon or heterocyclic structures and/or aromatic or polyaromatic structures substituted with one or more of the above functional groups. Candidate agents are also found among biomolecules including peptides, saccharides, fatty acids, steroids, purines, pyrimidines, derivatives, structural analogs or combinations thereof.

[0126] Candidate agents are obtained from a wide variety of sources including libraries of synthetic or natural compounds. For example, numerous means are available for random and directed synthesis of a wide variety of organic compounds and biomolecules, including expression of randomized oligonucleotides and oligopeptides. Alternatively, libraries of natural compounds in the form of bacterial, fungal, plant and organism extracts are available or readily produced. Additionally, natural or synthetically produced libraries and compounds are readily modified through conventional chemical, physical and biochemical means, and may be used to produce combinatorial libraries. Known pharmacological agents may be subjected to directed or random chemical modifications, such as acylation, alkylation, esterification, amidification, etc. to produce structural analogs.

[0127] Where the screening assay is a binding assay, one or more of the molecules may be joined to a label, where the label can directly or indirectly provide a detectable signal. Various labels include radioisotopes, fluorescers, chemiluminescers, enzymes, specific binding molecules, particles, e.g. magnetic particles, and the like. Specific binding molecules include pairs, such as biotin and streptavidin, digoxin and antidigoxin etc. For the specific binding members, the complementary member would normally be labeled with a molecule that provides for detection, in accordance with known procedures.

[0128] A variety of other reagents may be included in the screening assay. These include reagents like salts, neutral proteins, e.g. albumin, detergents, etc that are used to facilitate optimal protein-protein binding and/or reduce non-specific or background interactions. Reagents that improve the efficiency of the assay, such as protease inhibitors, nuclease inhibitors, anti-microbial agents, etc. may be used. The mixture of components are added in any order that provides for the requisite binding. Incubations are performed at any suitable temperature, typically between 4 and 40° C. Incubation periods are selected for optimum activity, but may also be optimized to facilitate rapid high-throughput screening. Typically between 0.1 and 1 hours will be sufficient.

[0129] The compounds having the desired biological activity may be administered in an acceptable carrier to a host. The active agents may be administered in a variety of ways. Depending upon the manner of introduction, the compounds may be formulated in a variety of ways. The concentration of therapeutically active compound in the formulation may vary from about 0.01-100 wt. %.

[0130] It must be noted that as used herein and in the appended claims, the singular forms “a”, “and”, and “the” include plural referents unless the context clearly dictates otherwise. Thus, for example, reference to “a complex” includes a plurality of such complexes and reference to “the formulation” includes reference to one or more formulations and equivalents thereof known to those skilled in the art, and so forth.

[0131] Unless defined otherwise, all technical and scientific terms used herein have the same meaning as commonly understood to one of ordinary skill in the art to which this invention belongs. Although any methods, devices and materials similar or equivalent to those described herein can be used in the practice or testing of the invention, the preferred methods, devices and materials are now described.

[0132] All publications mentioned herein are incorporated herein by reference for the purpose of describing and disclosing, for example, the methods and methodologies that are described in the publications which might be used in connection with the presently described invention. The publications discussed above and throughout the text are provided solely for their disclosure prior to the filing date of the present application. Nothing herein is to be construed as an admission that the inventors are not entitled to antedate such disclosure by virtue of prior invention.

[0133] The following examples are put forth so as to provide those of ordinary skill in the art with a complete disclosure and description of how to make and use the subject invention, and are not intended to limit the scope of what is regarded as the invention. Efforts have been made to ensure accuracy with respect to the numbers used (e.g. amounts, temperature, concentrations, etc.) but some experimental errors and deviations should be allowed for. Unless otherwise indicated, parts are parts by weight, molecular weight is average molecular weight, temperature is in degrees Celsius, and pressure is at or near atmospheric.

### EXPERIMENTAL

### Cloning and Characterization of Arabidopsis thaliana Genes.

[0134] Following DNA isolation, sequencing was performed using the Dye Primer Sequencing protocol, below. The sequencing reactions were loaded by hand onto a 48 lane ABI 377 and run on a 36 cm gel with the 36E-2400 run module and extraction. Gel analysis was performed with ABI software.

[0135] The Phred program was used to read the sequence trace from the ABI sequencer, call the bases and produce a sequence read and a quality score for each base call in the sequence., (Ewing et al. (1998) Genome Research 8:175-185; Ewing and Green (1998) Genome Research 8:186-194.) PolyPhred may be used to detect single nucleotide polymorphisms in sequences (Kwok et al. (1994) Genomics 25:615-622; Nickerson et al. (1997) Nucleic Acids Research 25(14):2745-2751.)

[0136] MicroWave Plasmid Protocol: Fill Beckman 96 deep-well growth blocks with 1 ml of TB containing 50 μg of ampicillin per ml. Inoculate each well with a colony picked with a toothpick or a 96-pin tool from a glycerol stock plate. Cover the blocks with a plastic lid and tape at two ends to hold lid in place. Incubate overnight (16-24 hours depending on the host stain) at 37° C. with shaking at 275 rpm in a New Brunswick platform shaker. Pellet cells by centrifugation for 20 minutes at 3250 rpm in a Beckman GS-R6K, decant TB and freeze pelleted cell in the 96 well block. Thaw blocks on the bench when ready to continue.

Prepare the MW-Tween20 solution

| | |
|---|---|
| For four blocks: | For 16 blocks: |
| 50 ml STET/TWEEN20 | 200 ml STET/TWEEN |
| 2 tubes RNAse (10 mg/ml,600 ulea) | 8 tubes RNAse |
| 1 tube lysozyme (25 mg) | 4 tubes lysozyme |

[0137] Pipette RNAse and Lysozyme into the corner of a beaker. Add Tween 20 solution and swirl to mix completely. Use the Multidrop (or Biohit) to add 25 ul of sterile H₂O (from the L size autoclaved bottles) to each well. Resuspend the pellets by vortexing on setting 10 of the platform vortexer. Check pellets after 4 min. and repeat as necessary to resuspend completely. Use the multidrop to add 70 μl of the freshly prepared MW-Tween 20 solution to each well. Vortex at setting 6 on the platform vortex for 15 seconds. Do not cause frothing.

[0138] Incubate the blocks at room temperature for 5 min. Place two blocks at a time in the microwave (1000 Watts) with the tape (placed on the H1 to H12 side of the block) facing away from each other and turn on at full power for 30 seconds. Rotate the blocks so that the tapes face towards each other and turn on at full power again for 30 seconds.

[0139] Immediately remove the blocks from the microwave and add 300 μl of sterile ice cold H₂O with the Multidrop. Seal the blocks with foil tape and place them in an H₂O/ice bath.

[0140] Vortex the blocks on 5 for 15 seconds and leave them in the H₂O/ice bath. Return to step 7 until all the blocks are in the ice water bath. Incubate the blocks for 15 minutes on ice. Spin the blocks for 30 minutes in the Beckman GS-6KR with GH3.8 rotor with Microplus carrier at 3250 rpm.

[0141] Transfer 100 μl of the supernatant to Corning/Costar round bottom 96 well trays. Cover with foil and put into fridge if to be sequenced right away. If not to be sequenced in the next day, freeze them at −20° C.

[0142] Dye Primer Sequencing: Spin down the DP brew trays and DNA template by pulsing in the Beckman GS-6KR with GH3.8 rotor with Microplus carrier. Big Dye Primer reaction mix trays (one 96 well cycleplate (Robbins) for each nucleotide), 3 microliters of reaction mix per well.

[0143] Use twelve channel pipetter (Costar) to add 2 μl of template to one each G,A,T,C, trays for each template plate. Pulse again to get both the reaction mix and template into the bottom of the cycle plate and put them into the MJ Research DNA Tetrad (PTC-225).

[0144] Start program Dye-Primer. Dye-primer is:

[0145] 96° C., 1 min 1 cycle

[0146] 96° C., 10 sec.

[0147] 55° C., 5 sec.

[0148] 70° C., 1 min 15 cycles

[0149] 96° C., 10 sec.

[0150] 70° C., 1 min. 15 cycles

[0151] 4° C. soak

[0152] When done cycling, using the Robbins Hydra 290 add 100 μl of 100% ethanol to the A reaction cycle plate and pool the contents of all four cycle plates into the appropriate well.

[0153] To perform ethanol precipitation: Use Hydra program 4 to add 100 μl 100% ethanol to each A tray. Use Hydra program 5 to transfer the ethanol and therefore combine the samples from plate to plate. Once the G, A, T, and C trays of each block are mixed, spin for 30 minutes at 3250 in the Beckman. Pour off the ethanol with a firm shake and blot on a paper towel before drying in the speed vac (˜10 minutes or until dry). If ready to load add 3 μl dye and denature in the oven at 95° C. for ˜5 minutes and load 2 μl. If to store, cover with tape and store at −20° C.

[0154] Common Solutions

[0155] Terrific Broth

[0156] Per liter:

[0157] 900 ml H₂O

[0158] 12 g bacto tryptone

[0159] 24 g bacto-yeast extract

[0160] 4 ml glycerol

[0161] Shake until dissolved and then autoclave. Allow the solution to cool to 60° C. or less and then add 100 ml of sterile 0.17M KH₂PO₄, 0.72M K₂HPO₄ (in the hood w/ sterile technique).

[0162] 0.17M KH₂PO₄, 0.72M K₂HPO₄

[0163] Dissolve 2.31 g of KH₂PO₄ and 12.54 g of K₂HPO₄ in 90 ml of H₂O.

[0164] Adjust volume to 100 ml with H₂O and autoclave.

[0165] Sequence loading Dye

[0166] 20 ml deionized formamide

[0167] 3.6 ml dH₂O

[0168] 400 μl 0.5M EDTA, pH 8.0

[0169] 0.2 g Blue Dextran

[0170] *Light sensitive, cover in foil or store in the dark.

[0171] STET/TWEEN

[0172] 10 ml 5M NaCl

[0173] 5 ml 1M Tris, pH 8.0

[0174] 1 ml 0.5M EDTA., pH 8.0

[0175] 25 ml Tween20

[0176] Bring volume to 500 ml with H₂O

[0177] The sequencing reactions are run on an ABI 377 sequencer per manufacturer's' instructions. The sequencing information obtained each run are analyzed as follows.

[0178] Sequencing reads are screened for ribosomal., mitochondrial., chloroplast or human sequence contamination. In good sequences, vector is marked by x's. These sequences go into biolims regardless of whether or not they pass the criteria for a ‘good’ sequence. This criteria is >=100 bases with phred score of >=20 and 15 of these bases adjacent to each other.

[0179] Sequencing reads that pass the criteria for good sequences are downloaded for assembly into consensus sequences (contigs). The program Phrap (copyrighted by Phil Green at University of Washington, Seattle, Wash.) utilizes both the Phred sequence information and the quality calls to assemble the sequencing reads. Parameters used with Phrap were determined empirically to minimize assembly of chimeric sequences and maximize differential detection of closely related members of gene families. The following parameters were used with the Phrap program to perform the assembly:

| | | |
|---|---|---|
| Penalty | −6 | Penalty for mismatches (substitutions) |
| Mismatch | 40 | Minimum length of matching sequence to |
| | | use in assembly of reads |
| Trim penalty | 0 | penalty used for identifying degenerate |
| | | sequence at beginning and end of read. |
| Minscore | 80 | Minimum alignment score |

[0180] Results from the Phrap analysis yield either contigs consisting of a consensus of two or more overlapping sequence reads, or singlets that are non-overlapping.

[0181] The contig and singlets assembly were further analyzed to eliminate low quality sequence utilizing a program to filter sequences based on quality scores generated by the Phred program. The threshold quality for “high quality” base calls is 20. Sequences with less than 50 contiguous high quality bases calls at the beginning of the sequence, and also at the end of the sequence were discarded. Additionally, the maximum allowable percentage of “low quality base calls in the final sequence is 2%, otherwise the sequence is discarded.

[0182] The stand-alone BLAST programs and Genbank databases were downloaded from NCBI for use on secure servers at the Paradigm Genetics, Inc. site. The sequences from the assembly were compared to the GenBank NR database downloaded from NCBI using the gapped version (2.0) of BLASTX. BLASTX translates the DNA sequence in all six reading frames and compares it to an amino acid database. Low complexity sequences are filtered in the query sequence. (Altschul et al. (1997) Nucleic Acids Res 25(17):3389-402).

[0183] Genbank sequences found in the BLASTX search with an E Value of less than 1e⁻¹⁰ are considered to be highly similar, and the Genbank definition lines were used to annotate the query sequences.

[0184] When no significantly similar sequences were found as a result of the BLASTX search, the query sequences were compared with the PROSITE database (Bairoch, A. (1992) PROSITE: A dictionary of sites and patterns in proteins. Nucleic Acids Research 20:2013-2018. ) to locate functional motifs.

[0185] Query sequences were first translated in six reading frames using the Wisconsin GCG pepdata program (Wisconsin Package Version 10.0, Genetics Computer Group (GCG), Madison, Wis., USA. ). The Wisconsin GCG motifs program (Wisconsin Package Version 10.0, Genetics Computer Group (GCG), Madison, Wis., USA.) used to locate motifs in the peptide sequence, with no mismatches allowed. Motif names from the PROSITE results were used to annotate these query sequences.

TABLE 1

| SEQ ID | Reference | Annotation |
|---|---|---|
| 1 | 2023001 | 0 >emb\|CAB10331.1\| (Z97339) pyruvate, orthophosphate dikinase |
| | | [Arabidopsis thaliana] Length = 960 |
| 2 | 2023002 | 1E-169 >sp\|O02654\|ENO_LOLPE ENOLASE (2-PHOSPHOGLYCERATE |
| | | DEHYDRATASE) (2-PHOSPHO-D-GLYCERATE HYDRO-LYASE) |
| | | >gi\|1911573\|bbs\|175625 (S80961) enolase [Loligo pealii = squids, nervous system, |
| | | Peptide, 434 aa] [Loligo pealei] Length = 434 |
| 3 | 2023003 | 0 >gi\|1669387 (U41998) actin 2 [Arabidopsis thaliana] Length = 377 |
| 4 | 2023004 | 1E-10 >sp\|P44677\|TOLB_HAEIN TOLB PROTEIN PRECURSOR |
| | | >gi\|1073946\|pir\|F64064 colicin tolerance protein (to\|B) homolog - Haemophilus |
| | | influenzae (strain Rd KW20) >gi\|1573352 (U32722) colicin tolerance protein (to\|B) |
| | | [Haemophilus influenzae Rd] Length = 427 |
| 5 | 2023005 | 0 >gi\|2062164 (AC001645) jasmonate inducible protein isolog |
| | | [Arabidopsis thaliana] Length = 470 |
| 6 | 2023006 | 0 >emb\|CAA20523.1\| (AL031369) Protein phosphatase 2C-like protein |
| | | [Arabidopsis thaliana] >gi\|4559345\|gb\|AA023006.1\|AC006585_1 (AC006585) |
| | | protein phosphatase 2C [Arabidopsis thaliana] Length = 355 |
| 7 | 2023007 | 0 >sp\|P31167\|ADTI _ARATH ADP,ATP CARRIER PROTEIN 1 PRECURSOR |
| | | (ADP/ATP TRANSLOCASE 1) (ADENINE NUCLEOTIDE TRANSLOCATOR 1) |
| | | (ANT 1) >gi\|99658\|pir\|S21313 ADP,ATP carrier protein - Arabidopsis thaliana |
| | | (fragment) >gi\|16175\|emb\|CAA46518\| (X65549) adenylate translocator |
| | | [Arabidopsis thaliana] >gi\|445607\|prf\|1909354A adenylate translocator |
| | | [Arabidopsis thaliana] Length = 379 |
| 8 | 2023008 | 0 >sp\|P29517\|TBB9_ARATH TUBULIN BETA-9 CHAIN >gi\|320190\|pir\|JQ1593 |
| | | tubulin beta-9 chain - Arabidopsis thaliana >gi\|166910 (M84706) beta-9 tubulin |
| | | [Arabidopsis thaliana] >gi\|5262779\|emb\|CAB45884.1\|(AL080282) tubulin beta-9 |
| | | chain [Arabidopsis thaliana] Length = 444 |
| 9 | 2023009 | 0 >pir\|\|S71288 magnesium chelatase chain - Arabidopsis thaliana |
| | | >gi\|1154627\|emb″CAA92802\| (Z68495) magnesium chelatase subunit |
| | | [Arabidopsis thaliana] Length = 1381 |
| 10 | 2023010 | 1E-133 >sp\|P92966\|RS41_ARATH ARGININE/SERINE-RICH SPLICING |
| | | FACTOR RSP41 >gi\|1707370\|emb\|CAA67799\| (X99436) splicing factor |
| | | [Arabidopsis thaliana] Length = 356 |
| 11 | 2023011 | 0 >dbj\|BAA11682\| (D83025) proline oxidase precursor [Arabidopsis |
| | | thaliana] Length = 499 |
| 12 | 2023012 | 0 >sp\|P176I4\|ATP2_NICPL ATP SYNTHASE BETA CHAIN, |
| | | MITOCHONDRIAL PRECURSOR >gi\|82133\|pir\|\|A24355 H+-transporting ATP |
| | | synthase (EC 3.6.1.34) beta-1 chain, mitochondrial - curled-leaved tobacco |
| | | >gi\|19685\|emb\|CAA26620\| (X02868) ATP synthase beta subunit [Nicotiana |
| | | plumbaginifolia] Length = 560 |
| 13 | 2023013 | 0 >gi\|2160158 (AC000132) Similar to elongation factor 1-gamma |
| | | (gb\|EF1G_XENLA). ESTs gb\|T20564,gb\|T45940,gb\|T04527 come from this gene. |
| | | [Arabidopsis thaliana] Length = 414 |
| 14 | 2023014 | Rgd(2092-2094) |
| 15 | 2023015 | 0 >sp\|P49676\|BGAL_BRAOL BETA-GALACTOSIDASE PRECURSOR |
| | | (LACTASE) >gi\|1076460\|pir\|S52393 beta-galactosidase (EC 3.2.1.23) - wild |
| | | cabbage >gi\|669059\|emb\|CAA59162\| (X84684) beta-galactosidase [Brassica |
| | | oleracea] Length = 828 |
| 16 | 2023016 | 0>pir\|S08534 translation elongation factor eEF-1 alpha chain (gene A4) |
| | | - Arabidopsis thaliana >gi\|295789\|emb\|CAA344561 (X16432) elongation factor 1- |
| | | alpha [Arabidopsis thaliana] Length = 449 |
| 17 | 2023017 | 2E-68 >gi\|4091806 (AF052585) CONSTANS-like protein 2 [Malus |
| | | domestica] Length = 329 |
| 18 | 2023018 | 0 >sp\|024456\|GBLP_ARATH GUANINE NUCLEOTIDE-BINDING PROTEIN |
| | | BETA SUBUNIT-LIKE PROTEIN (WD-40 REPEAT AUXIN-DEPENDENT |
| | | PROTEIN ARCA) >gi\|2289095 (U77381) WD-40 repeat protein [Arabidopsis |
| | | thaliana] Length = 327 |
| 19 | 2023019 | 1 E-140 >sp\|Q03460\|GLSN_MEDSA GLUTAMATE SYNTHASE [NADH] |
| | | PRECURSOR (NADH-GOGAT) >gi\|484529\|pir\|JQ1977 glutamate synthase |
| | | (NADH) (EC 1.4.1.14) - alfalfa >gi\|166412 (L01660) NADH-glutamate synthase |
| | | [Medicago sativa] Length [32 [0 2194 |
| 20 | 2023020 | 1 E-159 >gi\|2677828 (U93166) cysteine protease [Prunus armeniaca] |
| | | Length [32 [0 358 |
| 21 | 2023021 | 3E-74 >sp\|P3\|167\|AD1_ARATH ADP,ATP CARRIER PROTEIN 1 |
| | | PRECURSOR (ADP/ATP TRANSLOCASE 1) (ADENINE NUCLEOTIDE |
| | | TRANSLOCATOR 1) (ANT 1) >gi\|99658\|pir\|S21313 ADP,ATP carrier protein - |
| | | Arabidopsis thaliana (fragment) >gi\|16175\|emb\|CAA46518\| (X65549) adenylate |
| | | translocator [Arabidopsis thaliana] >gi\|445607\|prf\|1909354A adenylate |
| | | translocator [Arabidopsis thaliana] Length = 379 |
| 22 | 2023022 | 1E-136 >pir\|\|S71265 ferritin - Arabidopsis thaliana |
| | | >gi\|124640\|emb\|CAA63932\| (X94248) ferritin [Arabidopsis thaliana] Length = 255 |
| 23 | 2023023 | 0 >sp\|P2S856\|GI3PA_ARATH GLYCERALDEHYDE 3-PHOSPHATE |
| | | DEHYDROGENASE A, CHLOROPLAST PRECURSOR >gi\|2117520\|pir\|\|JQ1285 |
| | | glyceraldehyde-3-phosphate dehydrogenase (NADP+) (phosphorylating) (EC |
| | | 1.2.1.13) A precursor, chloroplast - Arabidopsis thaliana >gi\|166704 (M64117) |
| | | glyceraldehyde 3-phosphate dehydrogenase [Arabidopsis thaliana] |
| | | >gi\|402885\|emb\|CAA66816\| (X98130) glyceraldehyde-3-phosphate |
| | | dehydrogenase (NADP+) (phosphorylating) [Arabidopsis thaliana] Length = 396 |
| 24 | 2023024 | Tyr_Phospho_Site(1382-1388) |
| 25 | 2023025 | 0 >gi\|2062167 (AC001645) Proline-rich protein APG isolog [Arabidopsis |
| | | thaliana] Length = 322 |
| 26 | 2023026 | 0 >gi\|3834314 (AC005679) Similar to gene pi010 glycosyltransferase |
| | | gi\|2257490 from S. pombe clone 1750 gb\|AB004534. ESTs gb\|T46079 and |
| | | gb\|AA394466 come from this gene. [Arabidopsis thaliana] Length = 405 |
| 27 | 2023027 | 0 >sp\|P25856\|G3PA_ARATH GLYCERALDEHYDE 3-PHOSPHATE |
| | | DEHYDROGENASE A, CHLOROPLAST PRECURSOR >gi\|2117520\|pir\|\|JQ1285 |
| | | glyceraldehyde-3-phosphate dehydrogenase (NADP+) (phosphorylating) (EC |
| | | 1.2.1.13) A precursor, chloroplast - Arabidopsis thaliana >gi\|166704 (M64117) |
| | | glyceraldehyde 3-phosphate dehydrogenase [Arabidopsis thaliana] |
| | | >gi\|1402885\|emb\|CAA66816\| (X98130) glyceraldehyde-3-phosphate |
| | | dehydrogenase (NADP+) (phosphorylating) [Arabidopsis thaliana] Length = 396 |
| 28 | 2023028 | 1E-170 >pir\|\|UQMUM ubiquitin precursor - Arabidopsis thaliana |
| | | >gi\|17678\|emb\|CAA31331\| (X12853) polyubiquitin (AA 1-382) [Arabidopsis |
| | | thaliana] >gi\|987519 (U33014) polyubiquitin [Arabidopsis thaliana] |
| | | >gi\|226499\|prf\|\|1515347A poly-ubiquitin [Arabidopsis thaliana] Length = 382 |
| 29 | 2023029 | 3E-71 >sp\|P37707\|B2_DAUCA B2 PROTEIN >gi\|322726\|pir\|\|S32124 B2 |
| | | protein - carrot >gi\|297889 \|emb\|CAA51078\| (X72385) B2 protein [Daucus carota] |
| | | Length = 207 |
| 30 | 2023030 | 0 >sp\|P49078\|ASNS_ARATH ASPARAGINE SYNTHETASE [GLUTAMINE |
| | | HYDROLYZING] (GLUTAMINE-DEPENDENT ASPARAGINE SYNTHETASE) |
| | | >gi\|507946 (L29083) glutamine-dependent asparagine synthetase [Arabidopsis |
| | | thaliana] >gi\|5541701\|emb\|CAB51206.1\| (AL096860) glutamine-dependent |
| | | asparagine synthetase [Arabidopsis thaliana] Length = 584 |
| 31 | 2023031 | 2E-25 >gb\|AAD24193.1\|AF134238_1 (AF134238) PL6 protein [Mus musculus] |
| | | Length = 350 |
| 32 | 2023032 | 1E-149 >sp\|P04778\|CB22_ARATH CHLOROPHYLL A-B BINDING PROTEIN |
| | | 2 PRECURSOR (LHCII TYPE I CAB-2) (CAB-140) (LHCP) |
| | | >gi\|16376\|emb\|CAA27543\| (X03909) chlorophyll a/b binding protein (LHCP AB |
| | | 140) [Arabidopsis thaliana] Length = 267 |
| 33 | 2023033 | 1E-153 >gi\|1915974 (U62329) fructokinase [Lycopersicon esculentum] |
| | | >gi\|2102693 (U64818) fructokinase [Lycopersicon esculentum] Length = 328 |
| 34 | 2023034 | 1E-106 >sp\|Q64516\|GLPK_MOUSE GLYCEROL KINASE (ATP:GLYCEROL |
| | | 3-PHOSPHOTRANSFERASE) (GLYCEROKINASE) (GK) >gi\|1480469 (U48403) |
| | | glycerol kinase [Mus musculus] Length = 524 |
| 35 | 2023035 | 1E-103 >emb\|CAA16745.1\| (AL021711) heat shock transcription factor-like |
| | | protein [Arabidopsis thaliana] Length = 401 |
| 36 | 2023036 | 1E-170 >gi\|2286153 (AF007581) cytoplasmic malate dehydrogenase |
| | | [Zea mays] Length = 332 |
| 37 | 2023037 | Tyr_Phospho_Site (1338-1344) |
| 38 | 2023038 | 1E-179 >sp\|P19456\|PMA2_ARATH PLASMA MEMBRANE ATPASE 2 |
| | | (PROTON PUMP) >gi\|67973\|pir\|\|PXMUP2 H+-transporting ATPase (EC 3.6.1.35) |
| | | type 2, plasma membrane - Arabidopsis thaliana >gi\|166629 (J05570) H+-ATPase |
| | | [Arabidopsis thaliana] >gi\|5730129\|emb\|CAB52463.1\| (AL109796) H+-transporting |
| | | ATPase type 2, plasma membrane [Arabidopsis thaliana] Length = 948 |
| 39 | 2023039 | Pkc_Phospho_Site(5-7) |
| 40 | 2023040 | Tyr_Phospho_Site(830-837) |
| 41 | 2023041 | 8E-98 >gi\|4204274 (AC004146) ribulose bisphosphate carboxylase, |
| | | small subunit [Arabidopsis thaliana] Length = 180 |
| 42 | 2023042 | 1E-175 >emb\|CAB38206\| (AL035601) auxin-responsive GH3-like protein |
| | | [Arabidopsis thaliana] Length = 603 |
| 43 | 2023043 | Pkc_Phospho_Site(19-21) |
| 44 | 2023044 | 9E-58 >sP\|P26599\|PTB_HUMAN POLYPYRIMIDINE TRACT-BINDING |
| | | PROTEIN (PTB) (HETEROGENEOUS NUCLEAR RIBONUCLEOPROTEIN I) |
| | | (HNRNP I) (57 KD RNA-BINDING PROTEIN PPTB-1) >gi\|3576\|emb\|CAA43973\| |
| | | (X62006) polypirimidine tract binding protein [Homo sapiens] |
| | | >gi\|35774\|emb\|CAA43056\| (X60648) polypyrimidine tract-binding protein (pPTB) |
| | | [Homo sapiens] >gi\|409606\| (AC006273) PTB_HUMAN; PTB; |
| | | HETEROGENEOUS NUCLEA; HNRNP I; 57 KD RNA-BINDING PROTEIN PPTB |
| | | 1 [Homo sapiens] Length = 531 |
| 45 | 2023045 | 2E-79 >gi\|2642429 (AC002391) poly(A)-binding protein [Arabidopsis thaliana] |
| | | Length = 662 |
| 46 | 2023046 | 0 >sp\|Q38854\|CLA1_ARATH PROBABLE 1-DEOXYXYLULOSE-5- |
| | | PHOSPHATE SYNTHASE PRECURSOR (DXP SYNTHASE) >gi\|1399261 |
| | | (U27099) DEE [Arabidopsis thaliana] Length = 717 |
| 47 | 2023047 | Wd_Repeats(1245-1259) |
| 48 | 2023048 | 1E-151 >dbj\|BAA25181\| (D88537) delta 9 desaturase [Arabidopsis |
| | | thaliana] Length = 307 |
| 49 | 2023049 | 1E-167 >emb\|CAB43488.1\| (AJ012278) ATP-dependent Clp protease |
| | | subunit ClpP [Arabidopsis thaliana] >gi\|5360579\|dbj\|BAA82065.1\| (AB022326) |
| | | nC\|pP1 [Arabidopsis thaliana] Length = 298 |
| 50 | 2023050 | 0 >emb\|CAA67339\| (X98807) peroxidase ATP21a [Arabidopsis |
| | | thaliana] Length = 329 |
| 51 | 2023051 | 0 >gb\|AAD39650.1\|AC007591_15 (AC007591) Similar to gb\|Z70524 PDR5-like |
| | | ABC transporter from Spirodela polyrrhiza and is a member of the PF\|00005 ABC |
| | | transporter family. ESTs gb\|N97039 and gb\|T43169 come from this gene. [Arabid |
| 52 | 2023052 | 5E-52 >sp\|P41227\|ARDH_HUMAN N-TERMINAL ACETYLTRANSFERASE |
| | | COMPLEX ARD1 SUBUNIT HOMOLOG >gi\|517485\|emb\|CAA54691\| (X77588) |
| | | ARD1 N-acetyl transferase homologue [Homo sapiens] >gi\|1302661 (U52112) |
| | | ARD1 N-acetyl transferase related protein [Homo sapiens] Length = 235 |
| 53 | 2023053 | 1E-126 >gi\|3158476 (AF067185) aguaporin 2 [Samanea saman] Length = |
| | | 287 |
| 54 | 2023054 | 1E-173 >gi\|3212877 (AC004005)Lea-like protein [Arabidopsis thaliana] |
| | | Length = 325 |
| 55 | 2023055 | 1E-14 >sp\|Q28955\|PNAD_PIG PROTEIN N-TERMINAL ASPARAGINE |
| | | AMIDOHYDROLASE (PROTEIN NH2-TERMINAL ASPARAGINE DEAMIDASE) |
| | | (NTN-AMIDASE) (PNAD) (PROTEIN NH2-TERMINAL ASPARAGINE |
| | | AMIDOHYDROLASE) (PNAA) >gi\|1082956\|pir\|\|A55768 asparaginyl-peptide |
| | | amidohydrolase (EC 3.5.1.-) - pig>gi\|595950 (U17062) protein N-terminal |
| | | asparagine amidohydrolase [Sus scrofa] Length = 310 |
| 56 | 2023056 | 1E-172 >sp\|P53799\|FDFT_ARATH FARNESYL-DIPHOSPHATE |
| | | FARNESYLTRANSFERASE (SQUALENE SYNTHETASE) (SQS) (SS) (FPP:FPP |
| | | FARNESYLTRANSFERASE) >gi\|1076324\|pir\|\|554251 farnesyl-diphosphate |
| | | farnesyltransferase (EC 2.5.1.21)- Arabidopsis thaliana |
| | | >gi \|798820\|emb\|CAA60385\| (X86692) farnesyl-diphosphate farnesyltransferase |
| | | [Arabidopsis thaliana] >gi\|806325\|dbj\|BAA06103\| (D29017) squalene synthase |
| | | [Arabidopsis thaliana] >gi\|2232212 (AF004560) squalene synthase 1 [Arabidopsis |
| | | thaliana] >gi\|3096933\|emb\|CAA\| 8843.1\| (AL023094) farnesyl-diphosphate |
| | | farnesyltransferase [Arabidopsis thaliana] >gi\|4098519 (U79159) squalene |
| | | synthase [Arabidopsis thaliana] Length = 410 |
| 57 | 2023057 | 1E-141 >gi\|3413700 (AC004747) YME1 protein [Arabidopsis thaliana] |
| | | Length = 627 |
| 58 | 2023058 | Tyr_Phospho_Site(1667-1673) |
| 59 | 2023059 | 1E-144 >sp\|Q08682\|RSP4_ARATH 40S RIBOSOMAL PROTEIN SA (P40) |
| | | (LAMININ RECEPTOR HOMOLOG) >gi\|322536\|pir\|\|530570 laminin receptor |
| | | homolog - Arabidopsis thaliana >gi\|16380\|emb\|0AA487941 (X69056) laminin |
| | | receptor homologue [Arabidopsis thaliana] Length = 298 |
| 60 | 2023060 | 2E-43 >gi\|2735550 (U96638) unc-50 related protein; URP [Rattus |
| | | norvegicus] Length = 259 |
| 61 | 2023061 | Tyr_Phospho_Site (65-73) |
| 62 | 2023062 | 2E-30 >emb\|CAB03470.1\| (Z81137) Similarity to Yeast YIP1 protein |
| | | (SW:P53039); cDNA EST EMBL:T01608 comes from this gene; cDNA EST |
| | | EMBL:C07393 comes from this gene; cDNA EST EMBL:C07550 comes from this |
| | | gene; cDNA EST EMBL:C08746 comesfrom this gene . . . Length = 282 |
| 63 | 2023063 | 1E-151 >gi\|1773330 (U80071) glycolate oxidase [Mesembryanthemum |
| | | crystallinum] Length = 370 |
| 64 | 2023064 | 7E-44 >ref\|NP_006339.1\|PGTC90\| Golgi transport complex protein (90 kDa) |
| | | >gi\|3808235 (AF058718) 13 S Golgi transport complex 90kD subunit brain- |
| | | specific isoform [Homo sapiens] Length = 839 |
| 65 | 2023065 | 1E-168 >emb\|CAB44681\| (AL078620) mitochondrial carrier-like protein |
| | | [Arabidopsis thaliana] Length = 330 |
| 66 | 2023066 | 4E-12 >gi\|1764100 (U81805) GDP-D-mannose-4,6-dehydratase |
| | | [Arabidopsis thaliana] Length = 373 |
| 67 | 2023067 | 2E-22 >gb\|AAD48936.1\|AF160760_4 (AF160760) contains similarity to Pfam |
| | | family PF0040 - WD domain, G-beta repeat; score = 10.8, E = 3.2, N-2 [Arabidopsis |
| | | thaliana] Length = 892 |
| 68 | 2023068 | 1E-123 >sp\|P30302\|WC2C_ARATH PLASMA MEMBRANE INTRINSIC |
| | | PROTEIN 2C (WATER-STRESS INDUCED TONOPLAST INTRINSIC PROTEIN) |
| | | (WSI-TIP) >gi\|217869\|dbj\|BAA02520\|(D13254) transmembrane channel protein |
| | | [Arabidopsis thaliana] >gi\|4371283\|gb\|AAD18141\| (AC006260) plasma membrane |
| | | intrinsic protein 2C [Arabidopsis thaliana] >gi\|384324\|prf\|\|1905411A |
| | | transmembrane channel [Arabidopsis thaliana] Length = 285 |
| 69 | 2023069 | 6E-12 >dbj\|BAA74463\| (AB022605) mRNA (guanine-7-)methyltransferase |
| | | [Homo sapiens] Length = 504 |
| 70 | 2023070 | 1E-153 >gi\|206216\| (AC001645) jasmonate inducible protein isolog |
| | | [Arabidopsis thaliana] Length = 298 |
| 71 | 2023071 | 1E-157 >sp\|P43286\|WC2A_ARATH PLASMA MEMBRANE INTRINSIC |
| | | PROTEIN 2A >gi\|629542\|pir\|1544084 plasma membrane intrinsic protein 2a - |
| | | Arabidopsis thaliana >gi\|472877\|emb\|CAA53477\| (X75883) plasma membrane |
| | | intrinsic protein 2a [Arabidopsis thaliana] Length = 287 |
| 72 | 2023072 | 9E-98 >gi\|2252840 (AF013293) contains regions of similarity to |
| | | Haemophilus influenzae permease (SP:P38767) [Arabidopsis thaliana] |
| | | >gi\|604988\|gb\|AAF02797.1\|AF195115_17 (AF195115) contains regions of |
| | | similarity to Haemophilus influenzae permease (SP:P38767) [Arabidopsis thaliana] |
| | | Length = 746 |
| 73 | 2023073 | 9E-97 >gb\|AAF00673.11AC008153_25 (AC008153) 2-cys peroxiredoxin BAS1 |
| | | precursor (thiol-specific antioxidant protein) [Arabidopsis thaliana] |
| | | >gi\|6041816\|gb\|AAF02131.1\|AC0099\|8_3 (AC009918) 2-cys peroxiredoxin [Arab |
| 74 | 2023074 | 1E-168 >emb\|CAA06460\| (AJ005261) cytidine deaminase [Arabidopsis |
| | | thaliana] >gi\|3093276\|emb\|CAA06671.1\| (AJ005687) cytidine deaminase |
| | | [Arabidopsis thaliana] >gi\|4191787 (AC005917) cytidine deaminase [Arabidopsis |
| | | thaliana] >gi\|6090835\|gb\|AAF03358.\| AF 134487_1 (AF134487) cytidine |
| | | deaminase 1 [Arabidopsis thaliana] Length = 301 |
| 75 | 2023075 | 0 >emb\|CAA66863\| (X98190) peroxidase ATP2a [Arabidopsis thaliana] |
| | | >gi\|4371288\|gb\|AA018146\| (AC006260) peroxidase ATP2a [Arabidopsis thaliana] |
| | | Length = 327 |
| 76 | 2023076 | 1E-159 >sp\|Q08733\|WC1C_ARATH PLASMA MEMBRANE INTRINSIC |
| | | PROTEIN 1C (TRANSMEMBRANE PROTEIN B) (TMP-B) |
| | | >gi\|396218\|emb\|CAA491551 (X69294) transmembrane protein TMP-B |
| | | [Arabidopsis thaliana] Length = 286 |
| 77 | 2023077 | Rgd(840-842) |
| 78 | 2023078 | 1E-157 >emb\|CAB10405.1\| (Z97340) beta-1, 3-glucanase class I precursor |
| | | [Arabidopsis thaliana] Length = 306 |
| 79 | 2023079 | 1E-110 >gi\|3341679 (AC003672) dynamin-like protein phragmoplastin |
| | | 12 [Arabidopsis thaliana] Length = 613 |
| 80 | 2023080 | 1E-79 >gb\|AAA02747.1\| (L13655) membrane protein [Saccharum hybrid |
| | | cultivar H65-7052] Length = 325 |
| 81 | 2023081 | 1E-155 >pir\|\|S33443 chlorophyll a/b-binding protein CP29 - Arabidopsis |
| | | thaliana >gi\|298036\|emb\|CAA50712\| (X71878) CP29 [Arabidopsis thaliana] Length = |
| | | 290 |
| 82 | 2023082 | 0 >emb\|CAB56580.1\| (AJ011628) squamosa promoter binding protein-like |
| | | 1 [Arabidopsis thaliana] Length = 881 |
| 83 | 2023083 | Tyr_Phospho_Site(305-312) |
| 84 | 2023084 | 6E-22 >gb\|AAD46141.1\|AF081022_1 (AF081022) hypoxia-induced protein |
| | | kinase L31 [Lycopersicon esculentum] Length = 78 |
| 85 | 2023085 | 1E-154 >gi\|2281109 (AC002333) endochitinase isolog [Arabidopsis |
| | | thaliana] Length = 281 |
| 86 | 2023086 | 1E-79 >gi\|3415117 (AF081203) villin 3 [Arabidopsis thaliana] Length = |
| | | 966 |
| 87 | 2023087 | 1E-103 >ref\|NP_005435.1 \|PRODI+\| protein involved in sexual development |
| | | >gi\|\|1620898\|dbj\|BAA13508\| (D87957) protein involved in sexual development |
| | | [Homo sapiens] Length = 299 |
| 88 | 2023088 | 1E-106 >5p\|Q05047\|CP72_CATRO CYTOCHROME P450 72A1 (CYPLXXII) |
| | | (PROBABLE GERANIOL-10-HYDROXYLASE) (GE10H) >gi—167484 (L10081) |
| | | Cytochrome P-450 protein [i Catharanthus roseus] >gi\|445604\|prf\|\|1909351A |
| | | cytochrome P450 [Catharanthus roseus] Length = 524 |
| 89 | 2023089 | 5E-41 >ref\|NP000511.1\|PHEXA\| hexosaminidase A (alpha polypeptide) |
| | | >gi\|123079\|5p\|P06865\|HEXA_HUMAN BETA-HEXOSAMINIDASE ALPHA CHAIN |
| | | PRECURSOR (N-ACETYL-BETA-GLUCOSAMINIDASE) (BETA-N- |
| | | ACETYLHEXOSAMINIDASE) >gi\|67503\|pir\|AOHUBA beta-N- |
| | | acetylhexosaminidase (EC 3.2.1.52) alpha chain precursor - human >gi\|179458 |
| | | (M16424) beta-hexosaminidase alpha chain [Homo sapiens] |
| | | >gi\|4261632\|gb\|AAD13932\|1680052_1 (S62076) lysosomal enzyme beta-N- |
| | | acetylhexosaminidase A [Homo sapiens]Length = 529 |
| 90 | 2023090 | 0 >emb\|CAB36796.1\| (AL035525) pectinesterase-like protein [Arabidopsis |
| | | thaliana] Length = 477 |
| 91 | 2023091 | 1E-139 >emb\|CAB10240.1\| (Z97336) disease resistance RPS2 like protein |
| | | [Arabidopsis thaliana] Length = 719 |
| 92 | 2023092 | 1E-170 ) >pir\|\|S49332 seed tetraubiquitin - common sunflower |
| | | >gi\|303901\|dbj\|BAA03764\| (D16248) ubiquitin [Glycine max] |
| | | >gi\|456714\|dbj\|BAA05670\| (D28123) Ubiquitin [Glycine max] |
| | | >gi\|556688\|emb\|CAA84440\| (Z34988) seed tetraubiquitin [Helianthus annuus] |
| | | >gi\|994785\|dbj\|BAA05085\| (D26092) Ubiquitin [Glycine max] |
| | | >gi\|4263514\|gb\|AAD15340\| (AC004044) polyubiquitin [Arabidopsis thaliana] |
| | | >gi\|1096513\|prf\|2111434A tetraubiquitin [Helianthus annuus] Length = 305 |
| 93 | 2023093 | 1E-146 >gi\|2088652 (AF002109) 26S proteasome regulatory subunit |
| | | S12 isolog [Arabidopsis thaliana] >gi\|2351376 (U54561) translation initiation factor |
| | | eIF2 p47 subunit homolog [Arabidopsis thaliana] Length = 293 |
| 94 | 2023094 | 0 >pir\|\|B45511 chitinase (EC 3.2.1.14) precursor, basic - Arabidopsis |
| | | thaliana >gi\|166666 (M38240) basic chitinase [Arabidopsis thaliana] |
| | | >gi\|5689104\|dbj\|BAA82811.1\| (AB023449) basic endochitinase [Arabidopsis |
| | | thaliana] >gi\|5689106\|dbj\|BAA82812.1\| (AB023450) basic endochitinase |
| | | [Arabidopsis thaliana] >gi\|5689108\|dbj\|BAA82813.1\| (AB023451) basic |
| | | endochitinase [Arabidopsis thaliana] >gi\|5689112\|dbj\|BAA82815.1\| (AB023453) |
| | | basic endochitinase [Arabidopsis thaliana] >gi\|5689114\|dbi\|BAA82816.1\| |
| | | (AB023454) basic endochitinase [Arabidopsis thaliana] |
| | | >gi\|5689120\|dbi\|BAA82819.1\| (AB023457) basic endochitinase [Arabidopsis |
| | | thaliana] >gi\|5689122\|dbj\|BAA82820.\| (AB023458) basic endochitinase |
| | | [Arabidopsis thaliana] >gi\|5689124\|dbj\|BAA82821.1\| (AB023459) basic |
| | | endochitinase [Arabidopsis thaliana] >gi\|5689126\|dbj\|BAA82822.\| (AB023460) |
| | | basic endochitinase [Arabidopsis thaliana] >gi\|5689128\|dbi\|BAA82823.\| |
| | | (AB023461) basic endochitinase [Arabidopsis thaliana] |
| | | >gi\|5689132\|dbj\|BAA82825.1\| (AB023463) basic endochitinase [Arabidopsis |
| | | thaliana] Length = 335 |
| 95 | 2023095 | Tyr_Phospho_Site(1027-1033) |
| 96 | 2023096 | 1E-152 >pir\|\|523546 chlorophyll a/b-binding protein type I precursor |
| | | Lhb1B2 - Arabidopsis thaliana >gi\|16364\|emb\|CAA45790\| (X64460) photosystem |
| | | II type I chlorophyll a/b binding protein [Arabidopsis thaliana] >gi\|3128230 |
| | | (AC004077) photosystem II type I chlorophyll a/b binding protein [Arabidopsis |
| | | thaliana] >gi\|3337371 (AC004481) photosystem II type I chlorophyll a/b binding |
| | | protein [Arabidopsis thaliana] Length = 265 |
| 97 | 2023097 | Tyr_Phospho_Site(98-104) |
| 98 | 2023098 | 1E-133 >emb\|CAB38813.1\| (AL035679) ubiquitin-dependent proteolytic |
| | | protein [Arabidopsis thaliana] Length = 315 |
| 99 | 2023099 | 5E-45 >gb\|AAD26911.1\|AC0064299 (AC006429) auxin down-regulated protein |
| | | [Arabidopsis thaliana] Length = 291 |
| 100 | 2023100 | 1E-169 >sp\|P46523\|CLPA_BRANA ATP-DEPENDENT CLP PROTEASE |
| | | ATP-BINDING SUBUNIT CLPA PRECURSOR >gi\|480969\|pir\|S37557 clpA |
| | | protein - rape (fragment) >gi\|406311\|emb\|CAA53077\| (X75328) clpA [Brassica |
| | | napus] Length = 874 |
| 101 | 2023101 | 1E-100 >gb\|AAD28780.1\|AF134133_1 (AF134133) Lil3 protein [Arabidopsis |
| | | thaliana] Length = 262 |
| 102 | 2023102 | 4E-42 >gi\|3329368 (AF031244) nodulin-like protein [Arabidopsis |
| | | thaliana] Length = 559 |
| 103 | 2023103 | Tyr_Phospho_Site(206-212) |
| 104 | 2023104 | Tyr_Phospho_Site(740-748) |
| 105 | 2023105 | 1E-130 >pir\|\|520866 L-ascorbate peroxidase (EC 1.11.1.11) precursor |
| | | - Arabidopsis thaliana (fragment) Length = 263 |
| 106 | 2023106 | 2E-15 >gi\|4093153 (AF088280) phytochrome-associated protein 3 |
| | | [Arabidopsis thaliana] Length = 524 |
| 107 | 2023107 | Zinc Protease(1292-1301) |
| 108 | 2023108 | 1E-148 ) >dbj\|BAA32735\| (AB011545) GF14 mu [Arabidopsis thaliana] |
| | | >gi\|4559343\|gb\|AAD23005.1\|AC007087_24 (AC007087) DNA regulatory protein |
| | | GF14 mu [Arabidopsis thaliana] >gi\|5802796\|gb\|AAD51784.1\|AF145301_1 |
| | | (AF145301) 14-3-3 protein GF14 mu [Arabidopsis thaliana] Length = 263 |
| 109 | 2023109 | Zinc Finger_C3hc4(138-147) |
| 110 | 2023110 | 2E-49 >dbj\|BAA\|6833\| (D90901) spore germination protein c2 |
| | | [Synechocystis sp.] Length = 238 |
| 111 | 2023111 | 2E-44 >emb\|CAA21916.1\| (AL033389) yeast cell division cycle CDC50 |
| | | homolog [Schizosaccharomyces pombe] Length = 396 |
| 112 | 2023112 | Zinc Finger C2h2(879-903) |
| 113 | 2023113 | 3E-66 >gb\|AAD39835.1\|AF0570249 (AF057024) Ran-binding protein siRanBP |
| | | [Arabidopsis thaliana] Length = 234 |
| 114 | 2023114 | 1E-173 >9b\|AAD38248.1\|AC0061934 (AC006193) membrane related protein |
| | | [Arabidopsis thaliana] Length = 385 |
| 115 | 2023115 | Tyr_Phospho_Site(1708-1714) |
| 116 | 2023116 | 5E-63 >emb\|CAA69300\| (Y08061) endomembrane-associated protein |
| | | [Arabidopsis thaliana] >gi\|2982443\|emb\|CAA18251.1\| (AL022224) |
| | | endomembrane-associated protein [Arabidopsis thaliana] Length = 225 |
| 117 | 2023117 | 2E-46 >gi\|451193 (L28008) wali7 [Triticum aestivum] |
| | | >gi\|1090845\|prf\|\|2019486B wali7 gene [Triticum aestivum] Length = 270 |
| 118 | 2023118 | 1E-102 >pir\|\|S58499 IAA13 protein -Arabidopsis thaliana >gi\|972929 |
| | | (U18415)IAA13 [Arabidopsis thaliana] >gi\|2459414 (AC002332) auxin inducible |
| | | protein, IAA13 [Arabidopsis thaliana] Length = 246 |
| 119 | 2023119 | Tyr_Phospho_Site(14-21) |
| 120 | 2023120 | 1E-147 >sp\|P27521\|CB24_ARATH CHLOROPHYLL A-B BINDING PROTEIN |
| | | 4 PRECURSOR (LHCI TYPE III CAB-4) (LHCP) >gi\|166646 (M63931) light- |
| | | harvesting chlorophyll a/b binding protein [Arabidopsis thaliana] Length = 251 |
| 121 | 2023121 | Tyr_Phospho_Site(414-421) |
| 122 | 2023122 | 3E-59 >emb\|CAB10557.1\| (Z97344) trehalose-6-phosphate synthase like |
| | | protein [Arabidopsis thaliana] Length = 865 |
| 123 | 2023123 | Tyr_Phospho_Site(110-117) |
| 124 | 2023124 | 1E-109 >dbj\|BAA33810.1\| (AB018441) phi-1 [Nicotiana tabacum] Length = |
| | | 313 |
| 125 | 2023125 | 1E-120 >emb\|CAB56038.1\| (AJ011049) tyrosine decarboxylase |
| | | [Arabidopsis thaliana] Length = 489 |
| 126 | 2023126 | Tyr_Phospho_Site(640-647) |
| 127 | 2023127 | 3E-44 >ref\|NP005818.1\|PUGTREL1\| UDP-galactose transporter related |
| | | >gi\|2136346\|pir\|\|JC5024 UDP-galactose transporter related isozyme 1 - human |
| | | >gi\|1669560\|dbj\|BAA13525.1\| (D87989) UGTrel1 [Homo sapiens] Length = 322 |
| 128 | 2023128 | 1E-115 >sp\|P42055\|POR4_SOLTU 34 KD OUTER MITOCHONDRIAL |
| | | MEMBRANE PROTEIN PORIN (VOLTAGE-DEPENDENT ANION-SELECTIVE |
| | | CHANNEL PROTEIN) (VDAC) (POM 34) >gi\|629720\|pir\|\|S46936 34K porin - |
| | | potato >gi\|1076682\|pir\|\|A55364 porin (clone pPOM-34) - potato mitochondrion |
| | | >gi\|516166\|emb\|CAA56599\| (X80386) 34 kDA porin [Solanum tuberosum] Length = |
| | | 276 |
| 129 | 2023129 | Tyr_Phospho_Site(25-32) |
| 130 | 2023130 | 1E-76 >sp\|Q42656\|AGAL_COFAR ALPHA-GALACTOSIDASE PRECURSOR |
| | | (MELIBIASE) (ALPHA-D-GALACTOSIDE GALACTOHYDROLASE) >gi\|504489 |
| | | (L27992) alpha-galactosidase [Coffea arabica] Length = 378 |
| 131 | 2023131 | 2E-20 >gb\|AAF0\|440.1\|AF187961\| (AF187961) ubiquitin carboxyl-terminal |
| | | hydrolase [Schizosaccharomyces pombe] Length = 1129 |
| 132 | 2023132 | 1E-141 >emb\|CAA17567\| (AL021961) caffeoyl-CoA O-methyltransferase |
| | | - like protein [Arabidopsis thaliana] Length = 259 |
| 133 | 2023133 | 1E-97 >emb\|CAA64565\| (X95269) LRR protein [Lycopersicon esculentum] |
| | | Length = 221 |
| 134 | 2023134 | 3E-53 >dbj\|BAA24576\| (AB000778) phospholipase D [Rattus norvegicus] |
| | | Length = 1074 |
| 135 | 2023135 | 9E-48 >sp\|P27061\|PPA1_LYCES ACID PHOSPHATASE PRECURSOR 1 |
| | | >gi\|170370 (M83211) acid phosphatase type 1 [Lycopersicon esculentum] |
| | | >911170372 (M67474) acid phosphatase type 5 [Lycopersicon esculentum] |
| | | >gi\|445121\|prf\|\|1908427A acid phosphatase 1 [Lycopersicon esculentum] Length = |
| | | 255 |
| 136 | 2023136 | 1E-138 ) >gi\|3421072 (AF043519) 205 proteasome subunit PAA2 |
| | | [Arabidopsis thaliana] >gi\|4Q06819\|gb\|AAC95161.1\| (AC005970) 20S proteasome |
| | | subunit PAA2 [Arabidopsis thaliana] Length = 246 |
| 137 | 2023137 | 2E-75 >gb\|AAD\|4602\| (AF092910) stage specific peptide 24 |
| | | [Trypanosoma cruzi] Length = 287 |
| 138 | 2023138 | 1E-158 >pir\|1559519 tryptophan synthase (EC 4.2.1.20) alpha chain - |
| | | Arabidopsis thaliana >gi\|619753 (U18993) tryptophan synthase alpha chain |
| | | [Arabidopsis thaliana] >gi\|1585768\|prf\|\|2201482A Trp synthase:SUBUNIT = alpha |
| | | [Arabidopsis thaliana] Length = 312 |
| 139 | 2023139 | Tyr_Phospho_Site(892-900) |
| 140 | 2023140 | 3E-53 >emb\|CAB43522.1\| (AJ238804) non-specific lipid transfer protein |
| | | [Arabidopsis thaliana] Length = 118 |
| 141 | 2023141 | 1E-1 65 >pir\|1571226 xyloglucan endotransglycosylase-related protein |
| | | XTR-7 - Arabidopsis thaliana >gi\|1244760 (U43489) xyloglucan |
| | | endotransglycosylase-related protein [Arabidopsis thaliana] Length = 289 |
| 142 | 2023142 | 1E-146 >9b\|AAD55272.1\|AC008263_3 (AC008263) Identical to gb\|AF078080 |
| | | isochorismate synthase from Arabidopsis thaliana. ESTs gb\|R90272, gb\|A1100274 |
| | | and gb\|T42189 come from this gene. Length = 503 |
| 143 | 2023143 | 1E-158 >sp\|P43285\|WC1A_ARATH PLASMA MEMBRANE INTRINSIC |
| | | PROTEIN 1A >gi\|629540\|pir\|\|S44082 plasma membrane intrinsic protein 1a - |
| | | Arabidopsis thaliana >gi\|472873\|emb\|CAA534751 (X75881) plasma membrane |
| | | intrinsic protein 1a [Arabidopsis thaliana] Length = 286 |
| 144 | 2023144 | 1E-173 >sp\|Q38882\|PLD_ARATH PHOSPHOLIPASE D PRECURSOR (PLD) |
| | | (CHOLINE PHOSPHATASE) (PHOSPHATIDYLCHOLINE-HYDROLYZING |
| | | PHOSPHOLIPASE D) >gi\|1297302 (U36381) phospholipase D [Arabidopsis |
| | | thaliana] Length = 809 |
| 145 | 2023145 | 3E-97 >sp\|Q03943\|IM30_PEA CHLOROPLAST MEMBRANE-ASSOCIATED |
| | | 30 KD PROTEIN PRECURSOR (M30) >gi\|1076532\|pir\|S47966 probable lipid |
| | | transfer protein M30 precursor - garden pea >gi\|169107 (M73744) IM30 [Pisum |
| | | sativum] Length = 323 |
| 146 | 2023146 | 1E-167 >sp\|P5S737\|HS82_ARATH HEAT SHOCK PROTEIN 81-2 (HSP81-2) |
| | | >gi\|445127\|prf\|\|1908431B heat shock protein HSP81-2 [Arabidopsis thaliana] |
| | | Length = 699 |
| 147 | 2023147 | Pkc_Phospho_Site(56-58) |
| 148 | 2023148 | 3E-26 >dbj\|BAA759l 9.11 (AB009340) tartrate-resistant acid phoshatase |
| | | [Oryctolagus cuniculus] Length = 325 |
| 149 | 2023149 | 1E-159 >emb\|CAA17774.1\| (AL022023) plasma membrane intrinsic protein |
| | | (SIMIP) [Arabidopsis thaliana] Length = 280 |
| 150 | 2023150 | 1E-155 >gi\|2443883 (AC002294) Similar to RPS-2 disease resistance |
| | | protein [Arabidopsis thaliana] Length = 967 |
| 151 | 2023151 | 1E-99 >gb\|AAD29800.1\|AC006264_8 (AC006264) signal sequence receptor, |
| | | alpha subunit (SSR-alpha) [Arabidopsis thaliana] Length = 257 |
| 152 | 2023152 | Tyr_Phospho_Site(642-650) |
| 153 | 2023153 | 2E-64 >gb\|AAC78271.1\|AAC78271 (AC002330) glutamate-/aspartate-binding |
| | | peptide [Arabidosis thaliana] Length = 248 |
| 154 | 2023154 | 1E-172>gi\|4218963 (AF093672) xyloglucan endotransglycossylase |
| | | [Arabidopsis thaliana] >gi\|4539300 \|emb\|CAB39603.1\| (AL049480) xyloglucan |
| | | endo-1,4-beta-D-glucanase [Arabidopsis thaliana] Length = 287 |
| 155 | 2023155 | Zinc_Finger_C2h2(917-941) |
| 156 | 2023156 | 1E-108 >emb\|CAA65416\| (X96598) CaLB protein [Arabidopsis thaliana] |
| | | Length = 493 |
| 157 | 2023157 | 5E-26 >emb\|CAA64425\| (X94976) cell wall-plasma membrane linker |
| | | protein [Brassica napus] Length = 376 |
| 158 | 2023158 | 1E-159 >gb\|AAD25750.1\|AC007060_8 (AC007060) Strong similarity to F1913.7 |
| | | gi\|3033380 coatomer epsilon subunit from Arabidopsis thaliana BAC |
| | | gb\|AC004238. ESTs gb\|Z17908, gb\|AA728673, gb\|N96555, gb\|H76335, |
| | | gb\|AA712463, gb\|W43247, gb\|T4561 1, g . . . Length = 292 |
| 159 | 2023159 | Tyr_Phospho_Site(958-964) |
| 160 | 2023160 | 5E-14 >emb\|CAA18475.1\| (AL022347) serine /threonine kinase-like protein, |
| | | receptor kinase [Arabidopsis thaliana] Length = 656 |
| 161 | 2023161 | 3E-33 >sp\|P26568\|H11_ARATH HISTONE H1.1 >gi\|1070594\|pir\|\|HSMU11 |
| | | histone H1.1 - Arabidopsis thaliana >gi\|16317\|emb\|CAA44314\| (X62458) Histone |
| | | H1 [Arabidopsis thaliana] Length = 274 |
| 162 | 2023162 | 2E-97 >emb\|CAA07573.1\| (AJ007586) src2-like protein [Arabidopsis |
| | | thaliana] Length = 324 |
| 163 | 2023163 | Tyr_Phospho_Site(246-254) |
| 164 | 2023164 | 1E-171 >sp\|Q42547\|CAT3_ARATH CATALASE 3 >gi\|2347178 (U43147) |
| | | catalase 3 [Arabidopsis thaliana] >gi\|251 1726 (AF021937) catalase 3 [Arabidopsis |
| | | thaliana] Length = 492 |
| 165 | 2023165 | Tyr_Phospho_Site(75-83) |
| 166 | 2023166 | 1E-151 >emb\|CAA66966\| (X98322) peroxidase [Arabidopsis thaliana] |
| | | >gi\|1429219\|emb\|CAA67312\| (X98776) peroxidase ATP13a [Arabidopsis thaliana] |
| | | Length = 313 |
| 167 | 2023167 | 7E-38 >emb\|CAB41106.1\| (AL049656) myb-like protein [Arabidopsis |
| | | thaliana] Length = 261 |
| 168 | 2023168 | 8E-74 >gi\|4008006 (AF084034) receptor-like protein kinase [Arabidopsis |
| | | thaliana] Length = 645 |
| 169 | 2023169 | 1E-137 >pir\|\|JQ1678 transcription factor tga1 - Arabidopsis thaliana |
| | | >gi\|16550\|emb\|CAA481891 (X68053) transcription factor [Arabidopsis thaliana] |
| | | Length = 367 |
| 170 | 2023170 | 8E-57 >gi\|3184559 (AF052290) c-type cytochrome biogenesis protein |
| | | [Synechococcus PCC7002] Length = 246 |
| 171 | 2023171 | 1E-103 ) >gb\|AAD32768.1\|AC007661_5 (AC007661) alpha-carboxyltransferase |
| | | [Arabidopsis thaliana] Length = 796 |
| 172 | 2023172 | 1E-117 >gb\|AAD32822.1\|AC0076594 (AC007659) phosphatidate |
| | | cytidylyltransferase [Arabidopsis thaliana] Length = 430 |
| 173 | 2023173 | 1E-129 >dbj\|BAA32210\| (AB015138) Vacuolar proton pyrophosphatase |
| | | [Arabidopsis thaliana] Length = 770 |
| 174 | 2023174 | 2E-76 >gi\|3157927 (AC002131) Contains similarity to GDP-dissociation |
| | | inhibitor gb\|L07918 from Mus musculus. [Arabidopsis thaliana] Length = 223 |
| 175 | 2023175 | 2E-89 >pir\|\|S68589 serine/threonine-specific kinase (EC 2.7.1.-) |
| | | precursor - Arabidopsis thaliana >gi\|1405837\|emb\|CAA62824\| (X91630) receptor- |
| | | like kinase [Arabidopsis thaliana] >gi\|2150023 (AF001168) receptor-like kinase |
| | | LECRK1 [Arabidopsis thaliana] Length = 661 |
| 176 | 2023176 | 7E-86 >gi\|3769673 (AF095285) Tic20 [Pisum sativum] Length = 253 |
| 177 | 2023177 | 2E-17 >sp\|P46689\|GAS1_ARATH GIBBERELLIN-REGULATED PROTEIN 1 |
| | | PRECURSOR >gi\|2129588\|pir\|157144\| GAST1 protein homolog (clone GASA1) |
| | | - Arabidopsis thaliana >gi\|887939 (U11766) GAST1 protein homolog [Arabidopsis |
| | | thaliana] Length = 98 |
| 178 | 2023178 | 1E-166 >sp\|048661\|SPEE_ARATH SPERMIDINE SYNTHASE |
| | | (PUTRESCINE AMINOPROPYLTRANSFERASE) (SPDSY) |
| | | >gi\|2821 961\|dbj\|BAA24536\| (AB006693) spermidine synthase [Arabidopsis |
| | | thaliana Length = 293 |
| 179 | 2023179 | Ww_Domain_1(1284-1310 |
| 180 | 2023180 | 1E-104 >pir\|\|S27762 Sip1 protein - barley >gi\|167100 (M77475) seed |
| | | imbibition protein [Hordeum vulgare] Length = 757 |
| 181 | 2023181 | 1E-155 >sp\|P48641\|GSHR_ARATH GLUTATHIONE REDUCTASE, |
| | | CYTOSOLIC (GR) (GRASE) (OBP29) >gi\|1022797 (U37697) glutathione |
| | | reductase [Arabidopsis thaliana] Length = 499 |
| 182 | 2023182 | Tyr_Phospho_Site(599-607) |
| 183 | 2023183 | 1E-133 >gi\|3688799 (AF057137) gamma tonoplast intrinsic protein 2 |
| | | [Arabidopsis thaliana] Length = 253 |
| 184 | 2023184 | 1E-110 >gi\|3075392 (AC004484) steroid dehydrogenase [Arabidopsis |
| | | thaliana] Length = 390 |
| 185 | 2023185 | Tyr_Phospho_Site(48-56) |
| 186 | 2023186 | 6E-38 >emb\|CAAl6875.1\| (AL021749) receptor protein kinase like protein |
| 187 | 2023187 | Tyr_Phospho_Site 1737-1743 |
| 188 | 2023188 | 1E-128 >sp\|P48349\|143L_ARATH 14-3-3-LIKE PROTEIN GF14 LAMBDA (14- |
| | | 3-3-LIKE PROTEIN AFT1)>gi\|1084332\|pir\|S53727 14-3-3-like protein (AFT1)- |
| | | Arabidopsis thaliana>gi\|953321 (UO2565) 14-3-3-like protein 1 [Arabidopsis |
| | | thaliana] >gi\|1549404 (U68545) GF14 lambda [Arabidopsis thaliana] |
| | | >gi\|5802790\|gb\|AAD51781.1\|AF145298_1 (AF145298) 14-3-3 protein GF14 |
| | | lambda [Arabidopsis thaliana] Length = 248 |
| 189 | 2023189 | 1E-135 >emb\|CAB39932.1\| (AL049500) phosphoribosylanthranilate |
| | | transferase [Arabidopsis thaliana] Length = 857 |
| 190 | 2023190 | Serpin(1794-1804) |
| 191 | 2023191 | 3E-77 >gi\|3319340 (AF077407) contains similarity to E. coli cation |
| | | transport protein ChaC (GB:D90756) [Arabidopsis thaliana] Length = 197 |
| 192 | 2023192 | 1E-47 >emb\|CAA23033.1\| (AL035394) major latex protein [Arabidopsis |
| | | thaliana] Length = 151 |
| 193 | 2023193 | 7E-76 >gb\|AAB17191.1\| (U73103) laccase [Liriodendron tulipifera] Length = |
| | | 570 |
| 194 | 2023194 | Tyr_Phospho_Site(712-718) |
| 195 | 2023195 | 1E-161 >sp\|Q06611\|WC1B_ARATH PLASMA MEMBRANE INTRINSIC |
| | | PROTEIN 1B (TRANSMEMBRANE PROTEIN A) (TMP-A) |
| | | >gi\|296085\|emb\|0AA48356\| (X68293) transmembrane protein [Arabidopsis |
| | | thaliana] >gi\|3386599 (AC004665) plasma membrane intrinsic protein 1B |
| | | [Arabidopsis thaliana] Length = 286 |
| 196 | 2023196 | 1E-16 >sp\|P44445\|RLUD_HAEIN RIBOSOMAL LARGE SUBUNIT |
| | | PSEUDOURIDINE SYNTHASE D (PSEUDOURIDYLATE SYNTHASE) (URACIL |
| | | HYDROLYASE) >gil\|074296\|pir\|F64144 hypothetical protein H10176 - |
| | | Haemophilus influenzae (strain Rd KW20) >gi\|1573131 (U32702) sfhB protein |
| | | (sfhB) [Haemophilus influenzae Rd] Length = 324 |
| 197 | 2023197 | 2E-22 >gb\|AAD48964.1\|AF1472636 (AF147263) contains similarity to Medicago |
| | | truncatula N7 protein (GB:Y17613) [Arabidopsis thaliana] Length = 246 |
| 198 | 2023198 | Tyr_Phospho_Site 1422-1428 |
| 199 | 2023199 | Tyr_Phospho_Site(1517-1524) |
| 200 | 2023200 | 1E-109 >gi\|2642432 (AC002391) elicitor response element binding |
| | | protein (WRKY3) [Arabidopsis thaliana] Length = 317 |
| 201 | 2023201 | Tyr_Phospho_Site(271-279) |
| 202 | 2023202 | 1E-176 ) >gi\|3599968 (AF032123) clp protease [Arabidopsis thaliana] |
| | | Length = 310 |
| 203 | 2023203 | Tyr_Phospho_Site(964-971) |
| 204 | 2023204 | 1E-127 >emb\|CAA04386\| (AJ000886) Tetrafunctional protein of |
| | | glyoxysomal fatty acid beta-oxidation [Brassica napus] Length = 725 |
| 205 | 2023205 | 4E-32 >emb\|CAA04124\| (AJ000486) methionine gamma-lyase |
| | | [Trichomonas vaginalis ] Length = 396 |
| 206 | 2023206 | SE-61 >pir\|\|S66770 probable membrane protein YOL077c - yeast |
| | | (Saccharomyces cerevisiae) >gi\|1419909\|emb\|CAA99087\| (Z74819) ORF |
| | | YOL077c [Saccharomyces cerevisiae] Length = 291 |
| 207 | 2023207 | 1E-127 >emb\|CAA66785\| (X98108) 23 kDa polypeptide of oxygen- |
| | | evolving comlex (OEC) [Arabidopsis thaliana] Length = 263 |
| 208 | 2023208 | 1E-131 >gb\|AAF00659.1\|AC008153_11 (AC008153) cell division related protein |
| | | [Arabidopsis thaliana] Length = 663 |
| 209 | 2023209 | 1E-141 >sp\|P11574\|VATB_ARATH VACUOLAR ATP SYNTHASE SUBUNIT |
| | | B (V-ATPASE B SUBUNIT) (V-ATPASE 57 KD SUBUNIT) >gi\|81637\|pir\|\|A31886 |
| | | H+-transporting ATPase (EC 3.6.1.35) 57K chain - Arabidopsis thaliana |
| | | >gi\|166627 (J04185) nucleotide-binding subunit of vacuolar ATPase [Arabidopsis |
| | | thaliana] Length = 492 |
| 210 | 2023210 | 3E-45 >gi\|3242706 (AC003040) cyclin-dependent kinase inhibitor |
| | | protein [Arabidopsis thaliana] >gi\|3550262 (AF079587) cyclin-dependent kinase |
| | | inhibitor; ICK1 [Arabidopsis thaliana] Length = 191 |
| 211 | 2023211 | 1E-140 >gb\|AAD28777.1\|AF134130_1 (AF134130) Lhcb6 protein [Arabidopsis |
| | | thaliana] Length = 258 |
| 212 | 2023212 | 1E-151 ) >sp\|P29511\|TBA6_ARATH TUBULIN ALPHA-6 CHAIN |
| | | >gi\|282852\|pir\|\|JQ1597 tubulin alpha-6 chain - Arabidopsis thaliana >gi\|166920 |
| | | (M84699) TUA6 [Arabidopsis thaliana] >gi\|2244853\|emb\|CAB10275.11 (Z97337) |
| | | tubulin alpha-6 chain (TUA6) [Arabidopsis thaliana] Length = 450 |
| 213 | 2023213 | Tyr_Phospho_Site(405-412) |
| 214 | 2023214 | 1E-175 ) >emb\|CAB16823.1\| (Z99708) aminopeptidase-like protein |
| | | [Arabidopsis thaliana] Length = 634 |
| 215 | 2023215 | 2E-33 >emb\|CABI 30471 (Z99110) yjcL [Bacillus subtilis] Length = 396 |
| 216 | 2023216 | 1E-143 >sp\|Q05466\|HAT4_ARATH HOMEOBOX-LEUCINE ZIPPER |
| | | PROTEIN HAT4 (HD-ZIP PROTEIN 4) (HD-ZIP PROTEIN ATHB-2) |
| | | >gi\|629516\|pir\|\|S31424 homeotic protein Athb-2 - Arabidopsis thaliana |
| | | >gi\|16180\|emb\|CAA48246\| (X68145) Athb-2 [Aribido |
| 217 | 2023217 | 1E-149 >emb\|CAA72487\| (Y11791) peroxidase ATP26a [Arabidopsis |
| | | thaliana] Length = 276 |
| 218 | 2023218 | Tyr_Phospho_Site(404-411) |
| 219 | 2023219 | 1E-138 >gi\|2262167 (AC002329) cytosolic ribosomal protein S4 |
| | | [Arabidopsis thaliana] Length = 261 |
| 220 | 2023220 | 1E-163 >gb\|AAD30579.1\|AC007260_10 (AC007260) Similar to dTDP-D-glucose |
| | | 4,6-dehydratase [Arabidopsis thaliana] Length = 669 |
| 221 | 2023221 | 0 ) >pir\|\|SS2150 serine O-acetyltransferase (EC 2.3.1.30) - Arabidopsis |
| | | thaliana >gi\|2146776\|pir\|\|S67482 serine O-acetyltransferase (EC 2.3.1.30) - |
| | | Arabidopsis thaliana >gi\|608577 (L34076) serine acetyltransferase [Arabidopsis |
| | | thaliana] >gi\|608677\|emb\|CAA84371\| (Z348 |
| 222 | 2023222 | 1E-116 >emb\|CAB42903.\| (AL049862) UTP-glucose glucosyltransferase |
| | | like protein [Arabidopsis thaliana] Length = 478 |
| 223 | 2023223 | 1E-46 >emb\|CAB10538.2\| (Z97343) TEGT protein homolog [Arabidopsis |
| | | thaliana] Length = 262 |
| 224 | 2023224 | Tyr_Phospho_Site(1002-1010) |
| 225 | 2023225 | 1E-117 >gi\|2583121 (AC002387) phosphotransferase [Arabidopsis |
| | | thaliana] Length = 257 |
| 226 | 2023226 | Tyr_Phospho_Site(732-738) |
| 227 | 2023227 | Tyr_Phospho_Site(1093-1100) |
| 228 | 2023228 | 3E-24 >gb\|AAD236S1.11AC007119 _17 (AC007119) glycine-rich RNA binding |
| | | protein Ccr2 [Arabidopsis thaliana] Length = 179 |
| 229 | 2023229 | 1E-145 >dbj\|BAA342S0\| (AB013886) RAV1 [Arabidopsis thaliana] Length |
| | | = 344 |
| 230 | 2023230 | 1E-142 >emb\|CAB43855.1\| (AL078465) isp4 like protein [Arabidopsis |
| | | thaliana] Length = 753 |
| 231 | 2023231 | 4E-89 >gi\|2252866 (AF013294) contains region of similarity to SYT |
| | | [Arabidopsis thaliana] Length = 230 |
| 232 | 2023232 | 3E-27 >dbj\|BAA83740.1\| (AB023288) TRAB1 [Oryza sativa] Length = 318 |
| 233 | 2023233 | Tyr_Phospho_Site(919-926) |
| 234 | 2023234 | Tyr_Phospho_Site(1189-1196) |
| 235 | 2023235 | Tyr_Phospho_Site(301-307) |
| 236 | 2023236 | 1E-168 >gb\|AADS6290.1\|AF162279_1 (AF162279) 10-formyltetrahydrofolate |
| | | synthetase [Arabidopsis thaliana] Length = 634 |
| 237 | 2023237 | 1E-112 >gi\|3738320 (AC005170) cinnamoyl CoA reductase |
| | | [Arabidopsis thaliana] Length = 303 |
| 238 | 2023238 | 1E-18 >emb\|CAA23041.1\| (AL035394) Ap2 domain protein [Arabidopsis |
| | | thaliana] l Length = 343 |
| 239 | 2023239 | Tyr_Phospho_Site(393-401) |
| 240 | 2023240 | 4E-22 >gi\|699154 (U15180) P450 cytochrome,isopentenyltransf, |
| | | ferridox. [Mycobacterium leprae] Length = 187 |
| 241 | 2023241 | 1E-131 >sp\|P24636\|TBB4_ARATH TUBULIN BETA-4 CHAIN |
| | | >gi\|2129546\|pir\|\|S68122 beta-tubulin 4 - Arabidopsis thaliana >gi\|166640 |
| | | (M21415) beta-tubulin [Arabidopsis thaliana] Length = 444 |
| 242 | 2023242 | 1E-112 ) >gi\|3790581 (AF079179) RING-H2 finger protein RHB1a |
| | | [Arabidopsis thaliana] Length = 190 |
| 243 | 2023243 | 1E-124 >emb\|CAA55006\| (X78116) Acetoacetyl-coenzyme A thiolase |
| | | [Raphanus sativus] Length 406 |
| 244 | 2023244 | 7E-11 >gi\|2622337 (AE000890) inosine-540 -monophosphate |
| | | dehydrogenase related protein V [Methanobacterium thermoautotrophicum] |
| | | Length = 187 |
| 245 | 2023245 | 3E-11 >emb\|CAB45565.1\| (AL079355) phospholipase C [Streptomyces |
| | | coelicolor] Length = 501 |
| 246 | 2023246 | Tyr_Phospho_Site(1121-1127) |
| 247 | 2023247 | 1E-148 >pir\|\|525677 chlorophyll a/b-binding protein type I precursor |
| | | Lhb1B1 - Arabidopsis thaliana >gi\|16366\|emb\|CAA45789\| (X64459) photosystem |
| | | II type I chlorophyll a /b binding protein [Arabidopsis thaliana] >gi\|3128229 |
| | | (AC004077) photosystem II type I chlorophyll a/b binding protein [Arabidopsis |
| | | thaliana] >gi\|3337372 (AC004481) photosystem II type I chlorophyll a/b binding |
| | | protein [Arabidopsis thaliana] Length 266 |
| 248 | 2023248 | 1E-113 >gi\|3941466 (AF062887) transcription factor [Arabidopsis |
| | | thaliana] Length = 352 |
| 249 | 2023249 | 3E-18 >gb\|AAD42398.1\|AF157493_6 (AF157493) |
| | | carboxymethylenebutenolidase [Zymomonas mobilis] Length = 310 |
| 250 | 2023250 | Tyr_Phospho_Site(663-671) |
| 251 | 2023251 | Tyr_Phospho_Site(648-655) |
| 252 | 2023252 | 1E-138 ) >gb\|AAC62791.1\| (AF096371) contains similarity to D-isomer |
| | | specific 2-hydroxyacid dehydrogenases (Pfam: 2-Hacid_DH.hmm, score: 19.11) |
| | | [Arabidopsis thaliana] Length = 662 |
| 253 | 2023253 | Tyr_Phospho_Site(984-990) |
| 254 | 2023254 | 1E-130 >sp\|P42737\|CAH2_ARATH CARBONIC ANHYDRASE 2 |
| | | (CARBONATE DEHYDRATASE 2) >gi\|438449 (L18901) carbonic anhydrase |
| | | [Arabidopsis thaliana] Length = 259 |
| 255 | 2023255 | 1E-135 >emb\|CAB39787.1 \| (AL049488) chlorophyll a/b-binding protein-like |
| | | [Arabidopsis thaliana] >gi\|4741958\|gb\|AAD28776.1\|AF134129_1 (AF134129) |
| | | Lhcb5 protein [Arabidopsis thaliana] Length = 280 |
| 256 | 2023256 | Tyr_Phospho_Site(1564-1570) |
| 257 | 2023257 | 1E-140 ) >gi\|3264805 (AF071788) phosphoenolpyruvate carboxylase |
| | | Arabidopsis thaliana >gi\|4079630\|emb\|CAA10486\| AJ131710 phospho enole |
| | | pyruvate carboxylase [Arabidopsis thaliana] Length = 968 |
| 258 | 2023258 | 1E-111 >emb\|CAB10530.1\| (Z97343) EREBP-4 like protein [Arabidopsis |
| | | thaliana] Length = 603 |
| 259 | 2023259 | 1E-127 >sp\|P48491\|TPIS_ARATH TRIOSEPHOSPHATE ISOMERASE, |
| | | CYTOSOLIC (TIM) >gi\|414550 (U02949) cytosolic triose phosphate isomerase |
| | | [Arabidopsis thaliana] >gi\|742408\|prf\|\|2009415A triose phosphate isomerase |
| | | [Arabidopsis thaliana] Length = 254 |
| 260 | 2023260 | Tyr_Phospho_Site(963-969) |
| 261 | 2023261 | 1E-152 ) >emb\|CAB36755.1 \| (AL035523) protein-methionine-S-oxide |
| | | reductase [Arabidopsis thaliana] Length = 258 |
| 262 | 2023262 | Tyr_Phospho_Site(1080-1087) |
| 263 | 2023263 | 1E-140 >sp\|Q38997\|K110_ARATH SNF1-RELATED PROTEIN KINASE KIN10 |
| | | (AKIN10) >gi\|322596\|pir\|\|JC1446 serine/threonine protein kinase (EC 2.7.-.-) AK21 |
| | | - Arabidopsis thaliana >gi\|166600 (M93023) SNF1-related protein kinase |
| | | [Arabidopsis thaliana] >gil\| 742969\|emb\|CAA64384\| (X94757) ser/thr protein |
| | | kinase [Arabidopsis thaliana] Length = 512 |
| 264 | 2023264 | 1E-158 >gb\|AAD28774.1\|AF134127_\| (AF134127) Lhcb4.2 protein [Arabidopsis |
| | | thaliana] Length = 287 |
| 265 | 2023265 | Tyr_Phospho_Site(370-377) |
| 266 | 2023266 | 1E-173 >gb\|AAD25800.1\|AC006550_8 (AC006550) Identical to gb\|U12536 3- |
| | | methylcrotonyl-CoA carboxylase precursor protein from Arabidopsis thaliana. |
| | | ESTs gb\|H35836, gb″AA651295 and gb\|AA721862 come from this gene. Length = |
| | | 730 |
| 267 | 2023267 | Tyr_Phospho_Site(861-867) |
| 268 | 2023268 | 1E-131 >gi\|3941522 (AF062915) transcription factor [Arabidopsis |
| | | thaliana] Length = 249 |
| 269 | 2023269 | 1E-147 >9b\|AAB53256.1\| (U66408) GTP-binding protein [Arabidopsis |
| | | thaliana] >gi\|2345150\|gb\|AAB678301 (AF014822) developmentally regulated GTP |
| | | binding protein [Arabidopsis thaliana] Length = 399 |
| 270 | 2023270 | Tyr_Phospho_Site(786-793) |
| 271 | 2023271 | 1E-133 >gi\|3746809 (AF082882) adenylate kinase [Arabidopsis thaliana] |
| | | Length = 246 |
| 272 | 2023272 | 3E-91 >emb\|CAA71277\| (Y10228) P-glycoprotein-2 [Arabidopsis thaliana] |
| | | >gi\|2108254\|emb\|CAA712761 (Y10227) P-glycoprotein-2 [Arabidopsis thaliana] |
| | | >gi\|4538925\|emb\|0AB39661.11 (AL049483) P-glycoprotein-2 (pgp2) [Arabidopsis |
| | | thaliana] Length = 1233 |
| 273 | 2023273 | 1E-107 >gi\|1353352 (U31975) alanine aminotransferase |
| | | [Chlamydomonas reinhardtii] Length = 521 |
| 274 | 2023274 | 7E-84 >emb\|CAA23040.1\| (AL035394) receptor kinase [Arabidopsis |
| | | thaliana] Length = 638 |
| 275 | 2023275 | 1E-129 >gi\|1145697 (U39485) delta tonoplast integral protein |
| | | [Arabidopsis thaliana] Length = 250 |
| 276 | 2023276 | 1E-54 >emb\|CAA96657.1\| (Z72511) possible zinc finger protein; cDNA EST |
| | | EMBL:M89115 comes from this gene; cDNA EST EMBL:D71 533 comes from this |
| | | gene; cDNA EST EMBL:D72314 comes from this gene; cDNA EST EMBL:D75164 |
| | | comes from this gene; cDNA EST EMBL: . . . Length = 610 |
| 277 | 2023277 | Pkc_Phospho_Site(73-75) |
| 278 | 2023278 | 1E-154 >gi\|3335374 (AC003028) glutaredoxin-like protein [Arabidopsis |
| | | thaliana] Length = 293 |
| 279 | 2023279 | 1E-128 >gbjAAD57005.1\|AC009465_19 (AC009465) 40S ribosomal protein S3A |
| | | (S phase specific) [Arabidopsis thaliana] Length = 262 |
| 280 | 2023280 | 1E-114 >9b\|AAD28778.1\|AF1341311 (AF134131) PsbS protein [Arabidopsis |
| | | thaliana] Length = 265 |
| 281 | 2023281 | 7E-62 >gb\|AAD25756.1\|AC007060_14 (AC007060) Contains the PF\|00650 |
| | | CRAL/TRIO phosphatidyl-inositol-transfer protein domain. ESTs gb\|T76582, |
| | | gb\|N06574 and gb\|Z25700 come from this gene. [Arabidopsis thaliana] Length = |
| | | 540 |
| 282 | 2023282 | 0 >sp\|P25851\|F16P_ARATH FRUCTOSE-1,6-BISPHOSPHATASE, |
| | | CHLOROPLAST PRECURSOR (D-FRUCTOSE-1,6-BISPHOSPHATE 1- |
| | | PHOSPHOHYDROLASE) (FBPASE) >gi\|99693\|pir\|\|S16582 fructose- |
| | | bisphosphatase (EC 3.1.3.11) precursor, chloroplast -Arabidopsis thaliana |
| | | >gi\|11242\|emb\|CAA41154═ (X58148) fructose-bisphosphatase [Arabidopsis |
| | | thaliana] Length = 417 |
| 283 | 2023283 | 1E-162 >gi\|4220476 (AC006069) ribophorin I-like protein [Arabidopsis |
| | | thaliana] Length = 464 |
| 284 | 2023284 | 1E-151 >pir\|\|UQPM ubiquitin precursor - garden pea |
| | | >gi\|20589\|emb\|CAA34886\| (X17020) polyubiquitin (AA 1-381) [Pisum sativum] |
| | | >gi\|4115339 (L81142) ubiquitin [Pisum sativum] >gi\|226707\|prf\|\|1603402A poly- |
| | | ubiguitin [Pisum sativum] Length = 381 |
| 285 | 2023285 | Rgd(1319-1321) |
| 286 | 2023286 | 1E-143 >gi\|3980379 (AC004561) cyclin, PCNA [Arabidopsis thaliana] |
| | | Length = 264 |
| 287 | 2023287 | 1E-108 >gb\|AAF00071.1\|AF093604_1 (AF093604) apyrase [Arabidopsis |
| | | thaliana] Length = 471 |
| 288 | 2023288 | 8E-99 >sp\|P36397\|ARF1_ARATH ADP-RIBOSYLATION FACTOR 1 |
| | | >gi\|322518\|pir\| \|S28875 ADP-ribosylation factor 1 - Arabidopsis thaliana |
| 289 | 2023289 | Tyr_Phospho_Site(570-577) |
| 290 | 2023290 | Zinc Finger C3hc4(177-186) |
| 291 | 2023291 | Pkc_Phospho_Site(23-25) |
| 292 | 2023292 | 1E-146 ) >emb\|CAB43632.1\| (AL050351) SEC14-like protein [Arabidopsis |
| | | thaliana] Length = 617 |
| 293 | 2023293 | 1E-109 >sp\|P46422\|GTH4_ARATH GLUTATHIONE S-TRANSFERASE PM24 |
| | | (24 KD AUXIN-BINDING PROTEIN) (GST CLASS PHI) >gi\|479736\|pir\|\|535268 |
| | | glutathione transferase (EC 2.5.1.18) gst2- Arabidopsis thaliana >gi\|166723 |
| | | (L07589) glutathione 5-transferase [Arabidopsis thaliana] >gi\|347212 (L11601) |
| | | glutathione 5-transferase [Arabidopsis thaliana] >gi\|407090\|emb\|CAA53051\| |
| | | (X75303) glutathione S-transferase [Arabidopsis thaliana] |
| | | >gi\|2262152\|gb\|AAC78264.1\|AAC78264 (AC002330) Atpm24.1 glutathione S |
| | | transferase [Arabidopsis thaliana] Length = 212 |
| 294 | 2023294 | 3E-21 >emb\|CAA22977.1\| (AL035353) photosystem I subunit PSI-E-like |
| | | protein [Arabidopsis thaliana] >gi\|5732203\|emb\|CAB52678.1\| (AJ245908) |
| | | photosystem I subunit IV precursor [Arabidopsis thaliana] Length = 143 |
| 295 | 2023295 | Tyr_Phospho_Site(441-447) |
| 296 | 2023296 | 1E-159 >gi\|166835 (M86720) ribulose bisphosphate |
| | | carboxylase/oxygenase activase [Arabidopsis thaliana] >gi\|2642170 (AC003000) |
| | | Rubisco activase [Arabidopsis thaliana] Length = 446 |
| 297 | 2023297 | Tyr_Phospho_Site(757-764) |
| 298 | 2023298 | 1E-22 >gi\|4102690 (AF004806) 24 kDa seed maturation protein [Glycine |
| | | maxi Length = 212 |
| 299 | 2023299 | Tyr_Phospho_Site(366-373) |
| 300 | 2023300 | 1E-142 >gi\|4056500 (AC005896) acetyltransferase [Arabidopsis |
| | | thaliana] Length = 432 |
| 301 | 2023301 | 5E-68 >emb\|CAAQ7236\| (AJ006771) beta-galactosidase [Cicer arietinum] |
| | | Length = 707 |
| 302 | 2023302 | 1E-104 >sp\|P52577\|\|FRH_ARATH ISOFLAVONE REDUCTASE HOMOLOG |
| | | P3 >gi\|1361992\|pir\|\|S57613 isoflavonoid reductase homolog- Arabidopsis thaliana |
| | | >gi 18864321emb 1CAA898591 (Z49777) isoflavonoid reductase homologue |
| | | [Arabidopsis thaliana |
| 303 | 2023303 | 1E-123 >gb\|AAD20405\| (A0007019) ATP synthase [Arabidopsis |
| | | thaliana] Length = 240 |
| 304 | 2023304 | 1E-131 >dbj\|BAA32418\| (AB008103) ethylene responsive element binding |
| | | factor 1 [Arabidopsis thaliana] Length = 266 |
| 305 | 2023305 | 1E-142 >dbj\|BAA78560.1\| (AB024282) cysteine synthase [Arabidopsis |
| | | thaliana] >gi\|5824334\|emb\|CAB54830.\| (AJ010505) cysteine synthase |
| | | [Arabidopsis thaliana] Length = 368 |
| 306 | 2023306 | Tyr_Phospho_Site(92-100) |
| 307 | 2023307 | 2E-79 >emb\|CAB42925.1\| (AL049862) tRNA synthetase [Arabidopsis |
| | | thaliana] Length = 225 |
| 308 | 2023308 | 3E-25 >gb\|AAD46141.1\|AF0810221 (AF081022) hypoxia-induced protein L31 |
| | | [Lycopersicon esculentum] Length = 78 |
| 309 | 2023309 | 1E-110 >emb\|CAA16677\| (AL021684) LRR-like protein [Arabidopsis |
| | | thaliana] Length = 445 |
| 310 | 2023310 | 8E-38 >dbj\|BAA22374\| (D86122) Mei2-like protein [Arabidopsis thaliana] |
| | | Length = 884 |
| 311 | 2023311 | 1E-135 >gb\|AAD32291.1\|AC006533_15 (AC006533) acetolactate synthase |
| | | [Arabidopsis thaliana] Length = 484 |
| 312 | 2023312 | 2E-98 >gb\|AAB51567.11 (U75189) germin-like protein [Arabidopsis |
| | | thaliana] >gi\|1755158\|gb\|AAB51568.1\| (U75190) germin-like protein [Arabidopsis |
| | | thaliana] >gi\|1755170\|gb\|AAB51574.1\| (U75196) germin-like protein [Arabidopsis |
| | | thaliana] >gi\|1755172\|gb\|AAB51575.1\| (U75197) germin-like protein [Arabidopsis |
| | | thaliana] >gi\|1755180\|gb\|AAB51579.1\| (U75201) germin-like protein [Arabidopsis |
| | | thaliana] >gi\|1755190\|gb\|AAB51584.1\| (U75206) germin-like protein [Arabidopsis |
| | | thaliana] >gi\|1934728\|gb\|AAB51751.1\| (U95035) germin-like protein [Arabidopsis |
| | | thaliana] >gi\|4154285 (AF090733) germin-like protein 1 [Arabidopsis thaliana] |
| | | >gi\|4666248\|dbj\|BAA77207.1\| (D89055) germin-like protein precursor [Arabidopsis |
| | | thaliana] Length = 208 |
| 313 | 2023313 | Pkc_Phospho_Site(14-16) |
| 314 | 2023314 | Pkc_Phospho_Site(92-94) |
| 315 | 2023315 | 1E-119 >emb\|CAA96434\| (Z71 752) pectin methylesterase [Nicotiana |
| | | plumbaginifolia] Length = 315 |
| 316 | 2023316 | 1E-130 ) >sp\|O237O8\|PRC3_ARATH PROTEASOME COMPONENT C3 |
| | | (MACROPAIN SUBUNIT C3) (MULTICATALYTIC ENDOPEPTIDASE COMPLEX |
| | | SUBUNIT C3) >gi\|2511574\|emb\|CAA73619.1\| (Y13176) multicatalytic |
| | | endopeptidase [Arabidopsis thaliana] >gi\|3421075 (AF043520) 20S proteasome |
| | | subunit PAB1 [Arabidopsis thaliana] >gi\|4966368\|gb\|AA034699.1\|AC006341_27 |
| | | (AC006341) Identical to gb\|Y13176 Arabidopsis thaliana mRNA for proteasome |
| | | subunit prc3. ESTs gb\|H36972, gb\|T22551 and gb\|T13800 come from this gene. |
| | | Length = 235 |
| 317 | 2023317 | Pkc_Phospho_Site(11-13) |
| 318 | 2023318 | Tyr_Phospho_Site(1345-1353) |
| 319 | 2023319 | Tyr_Phospho_Site(309-315) |
| 320 | 2023320 | 1E-115 >gi\|2829275 (AF044265) nucleoside diphosphate kinase 3 |
| | | [Arabidopsis thaliana] >gi\|35l 3740 (AFO80118) contains similarity to nucleoside |
| | | diphosphate kinases (Pfam: NDK.hmm, score: 301.12) [Arabidopsis thaliana] |
| | | >gi\|4539375\|emb\|CAB40069.1\| (AL049525) nucleoside diphosphate kinase 3 |
| | | (ndpk3) [Arabidopsis thaliana] Length = 238 |
| 321 | 2023321 | 1E-160 >sp\|P42498\|PHYE_ARATH PHYTOCHROME E |
| | | >gi\|1076376\|pir\|\|S46313 phytochrome E- Arabidopsis thaliana |
| | | >gi\|452817\|emb\|CAA54075\| (X76610) phytochrome E [Arabidopsis thaliana] |
| | | >gi\|5816999\|emb\|CAB53654.1\| (AL110123) phytochrome E [Arabidopsis thaliana] |
| | | Length = 1112 |
| 322 | 2023322 | 1E-35 >gb\|AAD28506.1\|AF123265\| (AF123265) remorin 1 [Lycopersicon |
| | | esculentum] Length = 197 |
| 323 | 2023323 | 1E-171 >gi\|4220452 (AC006216) Similar to 9113413714 T19L18.21 |
| | | myrosinase-binding protein from Arabidopsis thaliana BAC gb AC004747. ESTs |
| | | gb\|T44298, gb\|T42447, gb\|R64761 and gb\|1100206 come from this gene. |
| | | [Arabidopsis thaliana] Length = 292 |
| 324 | 2023324 | 3E-21 >pir\|\|S62011 PH085 protein - yeast (Saccharomyces cerevisiae) |
| | | >gi\|1163103 (U43503) Lph16p [Saccharomyces cerevisiae] Length = 1223 |
| 325 | 2023325 | 4E-59 >sp\|P73839\|THDFSYNY3 POSSIBLE THIOPHENE AND FURAN |
| | | OXIDATION PROTEIN THDF >gi\|1652979\|dbj\|BAA178961 (D90910) thiophen and |
| | | furan oxidation protein [Synechocystis sp.] Length = 456 |
| 326 | 2023326 | 1E-117 >emb\|CAA17161\| (AL021890) calcium-dependent protein kinase |
| | | - like protein [Arabidopsis thaliana] >gi\|2961339\|emb\|CAA18097.1\| (AL022140) |
| | | calcium-dependent protein kinase-like protein [Arabidopsis thaliana] Length = 554 |
| 327 | 2023327 | 1E-105 >gi\|3980412 (AC004561) pumilio-like protein [Arabidopsis |
| | | thaliana] Length = 968 |
| 328 | 2023328 | 1E-160 ) >dbj\|BAA82066.1 \| (AB022327) nClpP2 [Arabidopsis thaliana] |
| | | Length = 279 |
| 329 | 2023329 | 1E-129 ) >emb\|CAA041721 (AJ000539) phosphatidylinositol synthase |
| | | [Arabidopsis thaliana] Length = 227 |
| 330 | 2023330 | 8E-65 >gb\|AAD11598.1\|AAD11598 (AF071527) calcium channel [Arabidopsis |
| | | thaliana] >gi\|4263043\|gb\|AAD15312\| (AC005142) calcium channel [Arabidopsis |
| | | thaliana] Length = 724 |
| 331 | 2023331 | Tyr_Phospho_Site(46-53) |
| 332 | 2023332 | 1E-126 >gi\|2981475 (AF053084) cinnamyl alcohol dehydrogenase |
| | | [Malus domestica] Length = 325 |
| 333 | 2023333 | Tyr_Phospho_Site(126-132) |
| 334 | 2023334 | 1E-142 >emb\|CAB39936.1\| (AL049500) osmotin precursor [Arabidopsis |
| | | thaliana] Length 244 |
| 335 | 2023335 | 1E-138 >gb\|AAD28767.1\|AF134120_1 (AF134120) Lhca2 protein [Arabidopsis |
| | | thaliana] Length = 257 |
| 336 | 2023336 | Tyr_Phospho_Site(628-636) |
| 337 | 2023337 | 3E-14 >sp\|P34092\|MYSB_DICDI MYOSIN IB HEAVY CHAIN |
| | | >gi\|102252\|pir\|\|A33284 myosin heavy chain lB - slime mold (Dictyostelium |
| | | discoideum) >gi\|167839 (M26037) myosin I heavy chain [Dictyostelium |
| | | discoideum] Length = 1111 |
| 338 | 2023338 | 2E-68 >sp\|P37707\|B2_DAUCA B2 PROTEIN >gi\|322726\|pir\|1532124 B2 |
| | | protein - carrot >gi\|297889\|emb\|CAA51078\| (X72385) B2 protein [Daucus carota] |
| | | Length = 207 |
| 339 | 2023339 | 1E-146 ) >gi\|3980402 (AC004561) tropinone reductase [Arabidopsis |
| | | thaliana] Length = 260 |
| 340 | 2023340 | 1E-68 >dbj\|BAA11226\| (D78151) human 26S proteasome subunit p97 |
| | | [Homo sapiens] Length = 908 |
| 341 | 2023341 | 1E-117 >sp\|P51430\|RS6_ARATH 40S RIBOSOMAL PROTEIN S6 |
| | | >gi\|2224751\|emb\|CAA74381\| (Y14052) ribosomal protein 56 [Arabidopsis |
| | | thaliana] Length = 249 |
| 342 | 2023342 | 1E-109 >emb\|CAA\|7550\| (AL021961) receptor protein kinase - like |
| | | protein [Arabidopsis thaliana] Length = 980 |
| 343 | 2023343 | 1E-106 >sp\|Q42599\|NUIM_ARATH NADH-UBIQUINONE |
| | | OXIDOREDUCTASE 23 KD SUBUNIT PRECURSOR (COMPLEX 1-23KD) (Cl- |
| | | 23KD) >gi\|1076356\|pir\|\|552380 NADH dehydrogenase (EC 1.6.99.3)- Arabidopsis |
| | | thaliana >gi\|666977\|emb\|CAA59061\| (X8431 8) NADH dehydrogenase |
| | | [Arabidopsis thaliana] >gi\|3152573 (AC002986) Match to NADH:ubiquinone |
| | | oxidoreductase gb\|X84318 from A. thaliana. ESTs gb\|Z27005, gb\|T04711, |
| | | gb\|T45078 and gb\|Z28689 come from this gene. [Arabidopsis thaliana] Length = |
| | | 222 |
| 344 | 2023344 | 1E-142 ) >gi\|3763918 (AC004450) isopropylmalate dehydratase |
| | | [Arabidopsis thaliana] Length = 251 |
| 345 | 2023345 | 5E-84 >sp\|P54641\|VATX_DICDI VACUOLAR ATP SYNTHASE SUBUNIT |
| | | AC39 (V-ATPASE AC39 SUBUNIT) (41 KD ACCESSORY PROTEIN) (DVA41) |
| | | >gi\|626048\|pir\|\|A55016 lysosomal membrane protein DVA41 - slime mold |
| | | (Dictyostelium discoideum) >gi\|532733 (U13150) vacuolar ATPase subunit DVA41 |
| | | [Dictyostelium discoideum] Length = 356 |
| 346 | 2023346 | 5E-88>gb\|AAD15451\| (AC006068) receptor protein kinase [Arabidopsis |
| | | thaliana] Length = 567 |
| 347 | 2023347 | 1E-61 >sp\|P3\|3166\|APT1_ARATH ADENINE |
| | | PHOSPHORIBOSYLTRANSFERASE 1 (APRT) >g\|199657\|pir\|\|S20867 adenine |
| | | phosphoribosyltransferase (EC 2.4.2.7)- Arabidopsis thaliana |
| | | >gi\|16164\|emb\|CAA41497\| (X58640) adenine phosphoribosyltransferase |
| | | [Arabidopsis thaliana] >gi\|433050 (L19637) adenine phosphoribosyltransferase |
| | | [Arabidopsis thaliana] >gi\|3935182 (AC004557) F17L21.25 [Arabidopsis thaliana] |
| | | Length = 183 |
| 348 | 2023348 | 1E-127 >emb\|CAA10060.1\| (AJ012571) glutathione transferase |
| | | [Arabidopsis thaliana] Length = 219 |
| 349 | 2023349 | Pkc_Phospho_Site(28-30) |
| 350 | 2023350 | 1E-123 >gi\|3201613 (AC004669) glutathione S-transferase [Arabidopsis |
| | | thaliana] Length = 215 |
| 351 | 2023351 | 1E-109 >sp\|P51119\|GLN2_VITVI GLUTAMINE SYNTHETASE CYTOSOLIC |
| | | ISOZYME 2 (GLUTAMATE-AMMONIA LIGASE) >gi\|1134898\|emb\|CAA63982\| |
| | | (X94321) glutamine synthetase [Vitis vinifera] Length = 356 |
| 352 | 2023352 | 2E-23 >gi\|871782 (L43081) pEARLI 4 gene product [Arabidopsis |
| | | thaliana] Length = 766 |
| 353 | 2023353 | 1E-150 >emb\|CAA66963\| (X98319) peroxidase [Arabidopsis thaliana] |
| | | >gi\|1429217\|emb\|CAA6731\| (X98775) peroxidase ATP12a [Arabidopsis thaliana] |
| | | Length = 321 |
| 354 | 2023354 | 8E-46 >gi\|4206763 (AF104328) cell wall-plasma membrane linker |
| | | protein homolog [Arabidopsis thaliana] Length = 306 |
| 355 | 2023355 | 1E-140 >gi\|1644427 (U74610) glyoxalase II [Arabidopsis thaliana] |
| | | Length = 256 |
| 356 | 2023356 | 1E-158 >gi\|3757514 (AC005167) plasma membrane intrinsic protein |
| | | [Arabidopsis thaliana] >gi\|4581129\|gb\|AAD24619.1\|AC005825_26 (AC005825) |
| | | plasma membrane intrinsic protein [Arabidopsis thaliana] Length = 278 |
| 357 | 2023357 | 1E-139 >gi\|2708750 (AC003952) physical impedence protein |
| | | [Arabidopsis thaliana] Length = 452 |
| 358 | 2023358 | 1E-117 >sp\|004157\|RAB7_ARATH RAS-RELATED PROTEIN RAB7 |
| | | >gi\|2065015\|emb\|CAA70951\| (Y09821) GTP-binding protein Rab7 [Arabidopsis |
| | | thaliana] >gi\|2505866\|emb\|0AA72904\| (Y12227) GTP-binding protein Rab7 |
| | | [Arabidopsis thaliana] >gi\|3287684 (AC003979) Strong similaity to gb\|Y09821 |
| | | GTP-binding protein Rab7 from A. thaliana. EST gb\|T76449 comes from this |
| | | gene. [Arabidopsis thaliana] Length = 203 |
| 359 | 2023359 | 3E-20 >gi\|3213227 (AF035209) v-SNARE Vtila [Mus musculus] |
| | | >gi\|3421062 (AF035823) 29-kDa Golgi SNARE [Mus musculus] Length = 217 |
| 360 | 2023360 | 2E-25 >dbj\|BAA37095.1\| (AB022209) ribonucleoprotein F [Rattus |
| | | norvegicus] Length = 415 |
| 361 | 2023361 | Pkc_Phospho_Site(67-69) |
| 362 | 2023362 | 6E-78 >gb\|AAD25780.1\|AC006577_16 (AC006577) Similar to gb\|U55861 RNA |
| | | binding protein nucleolysin (TIAR) from Mus musculus and contains several |
| | | PF\|00076 RNA recognition motif domains. ESTs gb\|T21032 and gb\|T44127 come |
| | | from this gene. [Arabidopsis t . . . Length = 426 |
| 363 | 2023363 | Pkc_Phospho_Site(14-16) |
| 364 | 2023364 | 3E-11 >emb\|CAA16558\| (AL021635) leucine rich repeat receptor kinase- |
| | | like protein [Arabidopsis thaliana] Length = 688 |
| 365 | 2023365 | 1E-140 >sp\|P34791\|CYP4_ARATH PEPTIDYL-PROLYL CIS-TRANS |
| | | ISOMERASE, CHLOROPLAST PRECURSOR (PPIASE) (ROTAMASE) |
| | | (CYCLOPHILIN) (CYCLOSPORIN A-BINDING PROTEIN) |
| | | >gi\|1076368\|pir\|\|B53422 peptidylprolyl isomerase (EC 5.2.1.8) ROC4- Arabidopsis |
| | | thaliana >911405131 (L14845) cyclophilin [Arabidopsis thaliana] >gi\|1322278 |
| | | (U42724) cyclophilin [Arabidopsis thaliana] Length = 260 |
| 366 | 2023366 | 2E-56 >emb\|CAA89697\| (Z49697) cysteine proteinase inhibitor [Ricinus |
| | | communis] Length = 209 |
| 367 | 2023367 | Tyr_Phospho_Site(1552-1558) |
| 368 | 2023368 | 1E-137 >gi\|2252855 (AF013294) similar to the myc family of helix-loop- |
| | | helix transcription factors [Arabidopsis thaliana] Length = 423 |
| 369 | 2023369 | 1E-103 >sp\|P48006\|EF1B_ARATH ELONGATION FACTOR 1-BETA A1 (EF- |
| | | 1-BETA) >gi\|480620\|pir\|\|S37103 translation elongation factor eEF-1 beta-A1 chain |
| | | - Arabidopsis thaliana (cv. Colombia) >gi\|398608\|emb\|CAA52751\| (X74733) |
| | | elongation factor-1 beta A1 [Arabidopsis thaliana] Length = 231 |
| 370 | 2023370 | 1E-109 >emb\|CAA74639\| (Y14251) glutathione S-transferase |
| | | [Arabidopsis thaliana] Length = 209 |
| 371 | 2023371 | Rgd(581-583) |
| 372 | 2023372 | 1E-131 ) >gb\|AAD51783.1\|AF145300_1 (AF145300) 14-3-3 protein GF14 kappa |
| | | [Arabidopsis thaliana] Length = 248 |
| 373 | 2023373 | 1E-139 >emb\|CAA51171\| (X72581) tonoplast intrinsic protein gamma |
| | | (gamma-TIP) [Arabidopsis thaliana] Length = 251 |
| 374 | 2023374 | Tyr_Phospho_Site(1037-1044) |
| 375 | 2023375 | 1E-126 >emb\|CAB10400.1\| (Z97340) enoyl-CoA hydratase like protein |
| | | [Arabidopsis thaliana] Length = 244 |
| 376 | 2023376 | 3E-15 >gb\|AAD34107.1\|AF151870_1 (AF151870) CGI-112 protein [Homo |
| | | sapiens Length = 208 |
| 377 | 2023377 | 1E-137 >gb\|AAD25640.1\|AC0071702 (AC007170) cytoplasmic aconitate |
| | | hydratase [Arabidopsis thaliana] Length = 898 |
| 378 | 2023378 | Tyr_Phospho_Site(787-793) |
| 379 | 2023379 | 1E-123 >sp\|P52032\|GSHY_ARATH GLUTATHIONE PEROXIDASE |
| | | HOMOLOG PRECURSOR >gi\|2129599\|pir≡1\|571250 glutathione peroxidase - |
| | | Arabidopsis thaliana >gil 1061036\|emb\|CAA6\| 9651 (X89866) glutathione |
| | | peroxidase [Arabidopsis thaliana] Length = 242 |
| 380 | 2023380 | 3E-99 >gb\|AAD25928.1\|AF085279\| (AF085279) hypothetical Ser-Thr protein |
| | | kinase [Arabidopsis thaliana] Length = 570 |
| 381 | 2023381 | 6E-58 >emb\|CAB43976.1\| (AL078579) zinc finger protein [Arabidopsis |
| | | thaliana] Length 327 |
| 382 | 2023382 | 1E-132 ) >gi\|3421087 (AF043524) 20S proteasome subunit PAE1 |
| | | [Arabidopsis thaliana] >gi\|6056394\|gbJAAF02858.1\|AC009324_7 (AC009324) 20S |
| | | proteasome subunit PAE1 [Arabidopsis thaliana] Length = 237 |
| 383 | 2023383 | 2E-14 >emb\|CAA92677.1\| (Z68315) Similarity to Human MAP kinase |
| | | phosphatase-1 (SW:PTN7 HUMAN) [Caenorhabditis elegans] Length = 150 |
| 384 | 2023384 | 1E-146 >gb\|AAD37165.1\|AF132742_\| (AF132742) 3-phosphoinositide- |
| | | dependent protein kinase-1 [Arabidopsis thaliana] Length = 491 |
| 385 | 2023385 | 1E-109 >emb\|CAA64820\| (X95573) salt-tolerance zinc finger protein |
| | | [Arabidopsis thaliana] Length = 227 |
| 386 | 2023386 | 1E-169 >gi\|3834309 (AC005679) Strong similarity to glycoprotein EP1 |
| | | gb\|L16983 Daucus carota and a member of S locus glycoprotein family PF\|00954. |
| | | ESTs gb\|F13813, gb\|T21052, gb\|R30218 and gb\|W43262 come from this gene. |
| 387 | 2023387 | 4E-20 >ref\|NP_006283.1\|PTSG101\| tumor susceptibility gene 101 >gi\|3184258 |
| | | (U82130) tumor susceptibility protein [Homo sapiens] Length = 390 |
| 388 | 2023388 | 1E-163 >gi\|1046225 (U21952) ethylene response sensor [Arabidopsis |
| | | thaliana] >9112623308 (AC002409) ethylene response sensor (ERS) [Arabidopsis |
| | | thaliana] >gi\|1584365\|prf\|\|2122405A ERS gene [Arabidopsis thaliana] Length = |
| | | 613 |
| 389 | 2023389 | Tyr_Phospho_Site(86-93) |
| 390 | 2023390 | 1E-138 >sp\|Q08733\|WC1C_ARATH PLASMA MEMBRANE INTRINSIC |
| | | PROTEIN 10 (TRANSMEMBRANE PROTEIN B) (TMP-B) |
| | | >gi\|396218\|emb\|CAA49155\| (X69294) transmembrane protein TMP-B |
| | | [Arabidopsis thaliana] Length = 286 |
| 391 | 2023391 | 7E-28 >dbj\|BAA32422\| (AB008107) ethylene responsive element binding |
| | | factor 5 [Arabidopsis thaliana] Length = 300 |
| 392 | 2023392 | 1E-108 >dbj\|BAA31509\| (AB010877) chloroplast ribosomal protein L3 |
| | | [Nicotiana tabacum] Length = 259 |
| 393 | 2023393 | Pkc_Phospho_Site(133-135) |
| 394 | 2023394 | Tyr_Phospho_Site(1037-1043) |
| 395 | 2023395 | Tyr_Phospho_Site(603-609) |
| 396 | 2023396 | Tyr_Phospho_Site(579-586) |
| 397 | 2023397 | 1E-1-1 >dbj\|BAA2S180\| (D88536) delta 9 desaturase [Arabidopsis |
| | | thaliana] Length = 305 |
| 398 | 2023398 | Tyr_Phospho_Site(1372-1378) |
| 399 | 2023399 | 1E-105 >emb\|CAB08077\| (Z94058) pectinesterase [Lycopersicon |
| | | esculentum] Length = 504 |
| 400 | 2023400 | 4E-35 >emb\|CAA197651 (AL031004) RSZp22 sp\|icing factor [Arabidopsis |
| | | thaliana] >gi\|3435094\|gb\|AAD12769.1\| (AF033586) 9G8-like SR protein |
| | | [Arabidopsis thaliana] Length = 200 |
| 401 | 2023401 | 1E-125) >gi\|2191150 (AF007269) similar to mitochondrial carrier family |
| | | [Arabidopsis thaliana] Length = 352 |
| 402 | 2023402 | 1E-136 >emb\|CAA74025.1\| (Y13691) multicatalytic endopeptidase |
| | | complex, proteasome component, alpha subunit [Arabidopsis thaliana] Length = |
| | | 245 |
| 403 | 2023403 | 1E-156 >sp\|P25697\|KPPR_ARATH PHOSPHORIBULOKINASE |
| | | PRECURSOR (PHOSPHOPENTOKINASE) (PRKASE) (PRk) |
| | | >gi\|99744\|pir\|\|516583 phosphoribulokinase (EC 2.7.1.19) precursor- Arabidopsis |
| | | thaliana >gi\|16441\|emb\|CAA41155\| (X58149) Ribulose-5-phosphate kinase |
| | | [Arabidopsis thaliana] Length = 395 |
| 404 | 2023404 | 1E-90 >dbj\|BAA77837.1\| (AB027458) ACE [Arabidopsis thaliana] |
| | | >gi\|5903086\|gb\|AAD55644.1\|AC008017_17 (AC008017) ACE [Arabidopsis |
| | | thaliana] Length = 594 |
| 405 | 2023405 | 1E-98 >dbj\|BAA24804\| (AB010946) AtRer1B [Arabidopsis thaliana] Length |
| | | = 195 |
| 406 | 2023406 | Tyr_Phospho_Site(120-126) |
| 407 | 2023407 | 1E-143 >gb\|AAD39331.1\|AC00725820 (AC007258) pyruvate dehydrogenase |
| | | E1 alpha subunit [Arabidopsis thaliana] Length = 389 |
| 408 | 2023408 | Tyr_Phospho_Site(593-601) |
| 409 | 2023409 | 1E-14 >gi\|3152583 (AC002986) Contains similarity to inhibitor of |
| | | apoptosis protein gb\|U4S88l from D. melanogaster. [Arabidopsis thaliana] Length = |
| | | 347 |
| 410 | 2023410 | Tyr_Phospho_Site(1596-1603) |
| 411 | 2023411 | Tyr_Phospho_Site(1068-1075) |
| 412 | 2023412 | 1E-127 >gb\|AAD31074.1\|AC007357_23 (AC007357) Similar to gb\|AF038007 |
| | | FICI gene from Homo sapiens and is a member of the PF100122 E1-E2 ATPase |
| | | family. ESTs gb\|T45045 and gb\|AA394473 come from this gene. [Arabidopsis |
| | | thaliana] Length = 1203 |
| 413 | 2023413 | 1E-123 >gi\|2583123 (AC002387) nucleotide sugar epimerase |
| | | [Arabidopsis thaliana] Length = 437 |
| 414 | 2023414 | 1E-127 >gb\|AAD28780.1\|AF134133_1 (AF134133) Lil3 protein [Arabidopsis |
| | | thaliana] Length = 262 |
| 415 | 2023415 | 3E-94 >gi\|2511546 (AF022658) c2h2 zinc finger transcription factor |
| | | [Arabidopsis thaliana] Length = 238 |
| 416 | 2023416 | Tyr_Phospho_Site(724-732) |
| 417 | 2023417 | 1E-123 >gi\|2618723 (U49073) IAA17[Arabidopsis thaliana] >gi\|2921756 |
| | | (AF040631) IAA17\|AXR3 protein [Arabidopsis thaliana] |
| | | >gi\|4389514\|gb\|AAB70451 (AC000104) Identical to Arabidopsis gb\|AF040632 and |
| | | gb\|U490731AA17/AXR3 gene. ESTs gb\|H36782 and gb\|F14074 come from this |
| | | gene. [Arabidopsis thaliana] Length = 229 |
| 418 | 2023418 | 1E-157 >gi\|4138855 (AF098072) IMMUTANS [Arabidopsis thaliana] |
| | | Length = 351 |
| 419 | 2023419 | Tyr_Phospho_Site(1298-1305) |
| 420 | 2023420 | 3E-41 >gb\|AAD45585.1\|AF132115_1 (AF132115) cytochrome b-561 |
| | | [Arabidopsis thaliana] Length = 230 |
| 421 | 2023421 | 1E-127 >pir\|1525435 chlorophyll a/b-binding protein- Arabidopsis |
| | | thaliana >gi\|16207\|emb\|0AA395341 (X56062) chlorophyll NB-binding protein |
| | | [Arabidopsis thaliana] >gi\|166644 (M85150) chlorophyll a/b-binding protein |
| | | [Arabidopsis thaliana] >gi\|4678304\|emb\|0AB41095.1\| (AL049655) chlorophyll a/b- |
| | | binding protein [Arabidopsis thaliana] Length = 241 |
| 422 | 2023422 | 1E-148 >sp\|P21216\|IPYR_ARATH SOLUBLE INORGANIC |
| | | PYROPHOSPHATASE (PYROPHOSPHATE PHOSPHO-HYDROLASE) (PPASE) |
| | | >gi\|81645\|pir\|\|S13379 inorganic pyrophosphatase (EC 3.6.1.1)- Arabidopsis |
| | | thaliana >gi\|16348\|emb\|CAA40764\| (X57545) inorganic pyrophosphatase |
| | | [Arabidopsis thaliana] Length = 263 |
| 423 | 2023423 | 8E-69 >gi\|3928094 (AC005770) zinc finger protein [Arabidopsis thaliana] |
| | | Length = 270 |
| 424 | 2023424 | 2E-57 >emb\|CAA77089\| (Y18227) blue copper binding-like protein |
| | | [Arabidopsis thaliana] Length = 196 |
| 425 | 2023425 | 1E-149 >emb\|CAA18252.1\| (AL022224) CLV1 receptor kinase like protein |
| | | [Arabidopsis thaliana] Length = 992 |
| 426 | 2023426 | Tyr_Phospho_Site(935-942) |
| 427 | 2023427 | 1E-157 >gb\|AAD18142\| (AC006260) plasma membrane intrinsic protein |
| | | 2B [Arabidopsis thaliana] Length = 285 |
| 428 | 2023428 | Tyr_Phospho_Site(699-707) |
| 429 | 2023429 | 1E-125 ) >gb\|AAD24640.1\|AC00691998 (AC006919) pyruvate kinase |
| | | [Arabidopsis thaliana] Length = 464 |
| 430 | 2023430 | Rgd(1781-1783) |
| 431 | 2023431 | 1E-134 >gb\|AAD24630.1\|AC0069198 (AC006919) fructose-bisphosphate |
| | | aldolase, cytoplasmic [Arabidopsis thaliana] Length = 358 |
| 432 | 2023432 | Pkc_Phospho_Site(101-103) |
| 433 | 2023433 | 1E-136 >gi\|3004557 (AC003673) plasma membrane proton pump H+ |
| | | ATPase, PMA1 [Arabidopsis thaliana] Length = 949 |
| 434 | 2023434 | 1E-138 ) >gi\|2191128 (AF007269) belongs to the L5P family of |
| | | ribosomal proteins [Arabidopsis thaliana] Length = 262 |
| 435 | 2023435 | 3E-98 >gi\|1946371 (U93215) regulatory protein Viviparous-1 isolog |
| | | [Arabidopsis thaliana] Length = 780 |
| 436 | 2023436 | 1E-156 >gb\|AAD28773.1\|AF134126_1 (AF134126) Lhcb3 protein [Arabidopsis |
| | | thaliana] >gi\|5002210\|gb\|AAD37362.1\|AF143691\| (AF143691) type III chlorophyll |
| | | a/b binding protein [Arabidopsis thaliana] Length = 265 |
| 437 | 2023437 | 7E-67 >gi\|2459430 (AC002332) CUC2 protein [Arabidopsis thaliana] |
| | | Length 268 |
| 438 | 2023438 | 1E-155 >sp\|P04777\|CB21_ARATH CHLOROPHYLL A-B BINDING PROTEIN |
| | | 165/180 PRECURSOR (LHCII TYPE I CAB-165/180) (LHCP) |
| | | >gi\|8l 603\|pir\|\|A29280 chlorophyll a/b-binding protein ab165- Arabidopsis thaliana |
| | | >gi\|16368\|emb\|CAA27540\| (X03907) chlorophyll a/b binding protein (LHCP AB 65) |
| | | [Arabidopsis thaliana] >gi\|16372\|emb\|CAA27541\| (X03908) chlorophyll a/b binding |
| | | protein (LHCP AB 180) [Arabidopsis thaliana] Length = 267 |
| 439 | 2023439 | 2E-58 >emb\|CAA63223\| (X92491) TOM20 [Solanum tuberosum] Length = |
| | | 204 |
| 440 | 2023440 | 1E-89 >emb\|CAB40742.1\| (AJ237751) aquaglyceroporin [Nicotiana |
| | | tabacum] Length = 247 |
| 441 | 2023441 | 1E-29 >gb\|AAD15610\| (AC006232) selenium-binding protein |
| | | [Arabidopsis thaliana] Length = 472 |
| 442 | 2023442 | 1E-146 ) >gb\|AAD20124\| (AC006201) 60S ribosomal protein L2 |
| | | [Arabidopsis thaliana] Length = 258 |
| 443 | 2023443 | 1E-125 >emb\|CAB45800.1 (AL080252) nodulin-like protein [Arabidopsis |
| | | thaliana] Length = 368 |
| 444 | 2023444 | Tyr_Phospho_Site(880-887) |
| 445 | 2023445 | Tyr_Phospho_Site(747-754) |
| 446 | 2023446 | Tyr_Phospho_Site(353—361) |
| 447 | 2023447 | 4E-34 >gi\|3421373 (AF079901) 28 kDa cis-Golgi SNARE [Mus |
| | | musculus] Length = 250 |
| 448 | 2023448 | 1E-64 >sp\|Q43794\|SYE_TOBAC GLUTAMYL-TRNA SYNTHETASE |
| | | (GLUTAMATE_TRNA LIGASE) (GLURS) >gi\|1084418\|pir\|S51685 glutamate- |
| | | tRNA ligase (EC 6.1.1.17) - common tobacco >gi\|603867\|emb\|CAA58506\| |
| | | (X83524) glutamate-tRNA ligase [Nicotiana tabacum] Length = 569 |
| 449 | 2023449 | 1E-110 >emb\|CAB16805.1\| (Z99708) minor allergen [Arabidopsis thaliana] |
| | | Length = 273 |
| 450 | 2023450 | 6E-17 >gb\|AAD2S848.1\|AC007197_1 (AC007197) disease resistance gene, 540 |
| | | partial [Arabidopsis thaliana] Length = 554 |
| 451 | 2023451 | 1E-65 >emb\|CAA74639\| (Y14251) glutathione 5-transferase [Arabidopsis |
| | | thaliana] Length = 209 |
| 452 | 2023452 | 2E-83 >gi\|2598932 (AF027157) auxin-responsive protein IAA2 |
| | | [Arabidopsis thaliana] Length = 174 |
| 453 | 2023453 | 8E-56 >gi\|3287683 (AC003979) Similar to apoptosis protein MA-3 |
| | | gb\|050465 from Mus musculus. [Arabidopsis thaliana] Length = 693 |
| 454 | 2023454 | 1E-125 ) >gi\|1764100 (U81805) GDP-D-mannose-4,6-dehydratase |
| | | [Arabidopsis thaliana] Length = 373 |
| 455 | 2023455 | 1E-109 >gi\|3510259 (AC005310) inorganic pyrophosphatase |
| | | [Arabidopsis thaliana] >gi\|3522960\|gb\|AAC34242.1\| (AC004411) inorganic |
| | | pyrophosphatase [Arabidopsis thaliana] Length = 216 |
| 456 | 2023456 | 2E-20 >emb\|CAA07361.1\|(AJ006972) TOM1 [Mus musculus] Length = |
| | | 492 |
| 457 | 2023457 | 1E-143 >gb\|AAD25595.1\|AC007211_17 (AC007211) chlorophyll A/B binding |
| | | protein [Arabidopsis thaliana] >gi\|4741946\|gb\|AAD28770.1\|AF1341231 |
| | | (AF134123) Lhcb2 protein [Arabidopsis thaliana] Length = 265 |
| 458 | 2023458 | 1E-79 ) >gb\|AAD31350.1\|AC0O7212_6 (AC007212) bZIP transcription factor |
| | | [Arabidopsis thaliana] Length = 171 |
| 459 | 2023459 | Pkc_Phospho_Site(2-4) |
| 460 | 2023460 | Pkc_Phospho_Site(9-11) |
| 461 | 2023461 | 1E-146 >gi\|3980396 (AC004561) C-4 sterol methyl oxidase |
| | | [Arabidopsis thaliana] Length = 253 |
| 462 | 2023462 | Tyr_Phospho_Site(620-626) |
| 463 | 2023463 | 6E-81 ) >gi\|3831468 (AC005700) phosphocholine cytidylyltransferase |
| | | [Arabidopsis thaliana] >gi\|5640001\|gb\|AAD45922.1\|AF165912_1 (AF165912) |
| | | GTP:phosphocholine cytidylyltransferase [Arabidopsis thaliana] Length = 332 |
| 464 | 2023464 | 1E-153 >gi\|3850579 (AC005278) Strong similarity to gb\|D14550 |
| | | extracellular dermal glycoprotein (EDGP) precursor from Daucus carota. ESTs |
| | | gb\|H37281, gb\|T44167, gb\|T21813, gb\|N38437, gb\|Z26470, gb\|R65072, |
| | | gb\|N76373, gb\|F15470, gb\|Z35182, gb\|H76373, gb\|Z34678 an . . . Length = 433 |
| 465 | 2023465 | 1E-40 >sp\|P48724\|IF5_PHAVU EUKARYOTIC TRANSLATION INITIATION |
| | | FACTOR 5 (EIF-5) >gi\|1008881 (L47221) eukaryotic initiation factor 5 [Phaseolus |
| | | vulgaris] Length = 443 |
| 466 | 2023466 | 2E-96 >sp\|P42043\|HMZ1_ARATH FERROCHELATASE I, |
| | | CHLOROPLAST/MITOCHONDRIAL PRECURSOR (PROTOHEME FERRO- |
| | | LYASE) (HEME SYNTHETASE) >gi\|1076325\|pir\|\|A54125 ferrochelatase (EC |
| | | 4.99.1.1) precursor, chloroplast- Arabidopsis thaliana >gi\|511081\|emb\|CAA51819\| |
| | | (X73417) ferrochelatase [Arabid |
| 467 | 2023467 | Pkc_Phospho_Site(8-10) |
| 468 | 2023468 | 1E-132 >dbj\|BAA31525\| (AB013301) ethylene responsive element binding |
| | | factor [Arabidopsis thaliana] Length = 281 |
| 469 | 2023469 | 1E-112 ) >sp\|P28187\|ARA4_ARATH RAS-RELATED PROTEIN ARA-4 |
| | | >gi\|81633\|pir\|\|JS0641 GTP-binding protein ara-4- Arabidopsis thaliana |
| | | >gi\|217839\|dbj\|BAA00831\| (D01026) small GTP-binding protein [Arabidopsis |
| | | thaliana] >gi\|3763922 (AC004450) GTP-binding protein [Arabidopsis thaliana] |
| | | Length = 214 |
| 470 | 2023470 | Rgd(476-478) |
| 471 | 2023471 | Zinc Finger C2h2(514-536) |
| 472 | 2023472 | 2E-92 >gi\|1872521 (U87833) zinc-finger protein Lsd1 [Arabidopsis |
| | | thaliana] >gi\|1872523 (U87834) zinc-finger protein Lsd1 [Arabidopsis thaliana] |
| | | >gi\|5262161\|emb\|CAB45804.1\| (AL080253) zinc-finger protein Lsd1 [Arabidopsis |
| | | thaliana] Length = 189 |
| 473 | 2023473 | 1E-133 >emb\|CAB42872.1\| (AJ012423) wall-associated kinase 2 |
| | | [Arabidopsis thaliana] Length = 732 |
| 474 | 2023474 | 2E-30 >gi\|2224911 (U93048) somatic embryogenesis receptor-like |
| | | kinase [Daucus carota] Length = 553 |
| 475 | 2023475 | Tyr_Phospho_Site(869-875) |
| 476 | 2023476 | 3E-46 >dbj\|BAA25999\| (AB013447) aluminum-induced [Brassica napus] |
| 477 | 2023477 | Rgd(263-265) |
| 478 | 2023478 | 1E-104 ) >emb\|CAA70498\| (Y09314) Rab2-like protein [Arabidopsis |
| | | thaliana] >gi\|5281023\|emb\|CAB45962.1\| (Z97343) GTP-binding RAB2A like |
| | | protein [Arabidopsis thaliana] Length = 211 |
| 479 | 2023479 | Tyr_Phospho_Site(465-473) |
| 480 | 2023480 | Tyr_Phospho_Site(143-151) |
| 481 | 2023481 | 2E-36 >emb\|CAB39631.1\| (AL049481) DNA-directed RNA polymerase |
| | | [Arabidopsis thaliana] Length = 748 |
| 482 | 2023482 | 8E-28 >dbj\|BAA76626.1\| (AB019392) muscle specific gene M9 [Homo |
| | | sapiens] >gi\|4689150jgb\|AAD27784.1\|AF077051_\| (AF077051) PTD001 [Homo |
| | | sapiens] Length 218 |
| 483 | 2023483 | 1E-148 >gi\|3249095 (AC003114) Contains similarity to dihydrofolate |
| | | reductase (dfr1) gb\|L13703 from Schizosaccharomyces pombe. ESTs gb\|N37567 |
| | | and gb\|T43002 come from this gene. [Arabidopsis thaliana] Length = 550 |
| 484 | 2023484 | 1E-111 >gi\|3746809 (AF082882) adenylate kinase [Arabidopsis thaliana] |
| | | Length = 246 |
| 485 | 2023485 | Tyr_Phospho_Site(370-378) |
| 486 | 2023486 | 7E-61 >gi\|549975 (U12858) nucleosome assembly protein I-like protein; |
| | | similar to mouse nap I, PIR Accession Number JS0707 [Arabidopsis thaliana] |
| | | Length = 382 |
| 487 | 2023487 | 1E-105 >sp\|Q96283IRB1A_ARATH RAS-RELATED PROTEIN RAB11A |
| | | >gi\|2598229\|emb\|CAA70112\| (Y08904) Rab11 protein [Arabidopsis thaliana] |
| | | >gi\|5541 676\|emb\|CAB51182.1\| (AL096859) Rab11 protein [Arabidopsis thaliana] |
| | | Length = 217 |
| 488 | 2023488 | 4E-89 >gb\|AAD25137.1\|AC0071273 (AC007127) ubiquitin protein [Arabidopsis |
| | | thaliana] Length = 536 |
| 489 | 2023489 | Zinc_Finger_C2h2(1776-1798) |
| 490 | 2023490 | 1E-112 >gi\|2191174 (AF007270) similar to the peptidase family S16 |
| | | [Arabidopsis thaliana] Length = 1096 |
| 491 | 2023491 | 1E-147 >gi\|3461837 (AC005315) expansin [Arabidopsis thaliana] |
| | | >gi\|3927842 (AC005727) expansin AtEx6 [Arabidopsis thaliana] Length = 257 |
| 492 | 2023492 | 1E-173 >gi\|3157937 (AC002131) Identical to aspartic proteinase cDNA |
| | | gb\|U51036 from A. thaliana. ESTs gb\|N96313, gb\|T21893, gb\|R30158, |
| | | gb\|T21482, gb\|T43650, gb\|R64749, gb\|R65157, gb\|T88269, gb\|T44552, |
| | | gb\|T22542, gb\|T76533, gb\|T44350, gb\|Z34591, gb\|AA728734, gb . . . Length = 506 |
| 493 | 2023493 | 4E-43 >dbj\|BAA259891 (089051) ERD6 protein [Arabidopsis thaliana] |
| | | Length = 496 |
| 494 | 2023494 | Tyr_Phospho_Site(419-426) |
| 495 | 2023495 | Tyr_Phospho_Site(1183-1190) |
| 496 | 2023496 | 1E-162 >emb\|CAA71627\| (Y10617) 12-oxophytodienoate reductase |
| | | [Arabidopsis thaliana] Length = 370 |
| 497 | 2023497 | Tyr_Phospho_Site(1175-1181) |
| 498 | 2023498 | Pkc_Phospho_Site(18-20) |
| 499 | 2023499 | 1E-12 >gi\|3834382 (AF033109) syntaxin 8 [Rattus norvegicus] Length = |
| | | 236 |
| 500 | 2023500 | 1E-132 >gi\|2317729 (AF013627) reversibly glycosylated polypeptide-1 |
| | | [Arabidopsis thaliana] Length = 357 |
| 501 | 2023501 | 9E-93 >sp\|P34091\|RL6_MESCR 605 RIBOSOMAL PROTEIN L6 (YL16-LIKE) |
| | | >gi\|280374\|pir\|\|S28586 ribosomal protein ML16 - common ice plant |
| | | >gi\|19539 \|emb\|CAA491751 (X69378) ribosomal protein YL16 |
| | | [Mesembryanthemum crystallinum] Length = |
| 502 | 2023502 | Pkc_Phospho_Site(26-28) |
| 503 | 2023503 | 3E-11>gi\|4100433 (AF000378) beta-glucosidase [Glycine max] Length |
| | | = 206 |
| 504 | 2023504 | Tyr_Phospho_Site(1044-1050) |
| 505 | 2023505 | Tyr_Phospho_Site(659-666) |
| 506 | 2023506 | 4E-66 >gi\|12443890 (AC002294) similar to NAM (gp\|X92205\|1321924) |
| | | and CUC2 (gp\|AB002560\|1944132) proteins [Arabidopsis thaliana] Length = 300 |
| 507 | 2023507 | 8E-24 >gi\|3608412 (AF079355) protein phosphatase-2c |
| | | [Mesembryanthemum crystallinum] Length = 309 |
| 508 | 2023508 | Tyr_Phospho_Site(392-398) |
| 509 | 2023509 | Tyr_Phospho_Site(184-191) |
| 510 | 2023510 | Tyr_Phospho_Site(877-883) |
| 511 | 2023511 | 8E-22 >gi\|2622711 (AE000918) ferripyochelin binding protein |
| | | (Methanobacterium thermoautotrophicum] Length = 151 |
| 512 | 2023512 | Pkc_Phospho_Site(11-13) |
| 513 | 2023513 | 2E-20 >ref\|NP005998.1\|PZNF216\| zinc finger protein 216 >gi\|3643809 |
| | | (AF062346) zinc finger protein 216 splice variant 1 [Homo sapiens] >gi\|3643811 |
| | | (AF062347) zinc finger protein 216 splice variant 2 [Homo sapiens] |
| | | >gi\|3668066\|gb\|AAC61801.1\| (AF062072) zinc finger protein 216 [Homo sapiens] |
| | | Length = 213 |
| 514 | 2023514 | Pkc_Phospho_Site(29-31) |
| 515 | 2023515 | 1E-103 >sp\|Q38912\|RAC3_ARATH RAC-LIKE GTP BINDING PROTEIN |
| | | ARAC3 >gi\|1304413 (U43501) Rac-like protein [Arabidopsis thaliana] >gi\|2645643 |
| | | (AF031427) Rho-like GTP binding protein [Arabidopsis thaliana] |
| | | >gi\|2924513\|emb\|CAA17767.1\| (AL022023) Rho1Ps homolog/ Rac-like protein |
| | | [Arabido |
| 516 | 2023516 | 4E-46 >emb\|CAA72716\| (Y11987) FPF1 protein [Sinapis alba] Length = |
| | | 110 |
| 517 | 2023517 | 1E-119 >emb\|CAB45987.1\| (AL080318) stress-induced protein sti1-like |
| | | protein [Arabidopsis thaliana] Length = 558 |
| 518 | 2023518 | 1E-145 >gi\|3980379 (AC004561) cyclin, PCNA [Arabidopsis thaliana] |
| | | Length = 264 |
| 519 | 2023519 | 1E-66 >emb\|CAB16514.1\| (Z99281) similar to ADP-ribosylation factor; |
| | | cDNA EST EMBL:C08179 comes from this gene; cDNA EST EMBL:C08337 |
| | | comes from this gene; cDNA EST EMBL:C09829 comes from this gene; cDNA |
| | | EST yk291b4.5 comes |
| 520 | 2023520 | Pkc_Phospho_Site(26-28) |
| 521 | 2023521 | 2E-45 >emb\|CAA74401.1\| (Y14072) HMG protein [Arabidopsis thaliana] |
| | | Length = 144 |
| 522 | 2023522 | 4E-40 >pir\|\|562699 photoassimilate-responsive protein PAR-1b precursor |
| | | - common tobacco >gi\|871487\|emb\|0AA587311 (X83851) mRNA inducible by |
| | | sucrose and salicylic acid expressed in sugar-accumulating tobacco plants [Ni |
| 523 | 2023523 | Pkc_Phospho_Site(165-167) |
| 524 | 2023524 | 2E-60 >gi\|3600061 (AF080120) contains similarity to DNA binding |
| | | proteins [Arabidopsis thaliana] >gi\|4850286\|emb\|CAB43042.1\| (AL049876) |
| | | protein [Arabidopsis thaliana] Length = 313 |
| 525 | 2023525 | 7E-42 >gi\|3789911 (AF081802) developmental protein DG1118 |
| | | [Dictyostelium discoideum] Length = 192 |
| 526 | 2023526 | Tyr_Phospho_Site(2-8) |
| 527 | 2023527 | Tyr_Phospho_Site(248-254) |
| 528 | 2023528 | Pkc_Phospho_Site(85-87) |
| 529 | 2023529 | 1E-125 >sp\|P28188\|ARA5_ARATH RAS-RELATED PROTEIN ARA-5 |
| | | >gi\|231 7906 (U89959) ARA-5[Arabidopsis thaliana] Length = 258 |
| 530 | 2023530 | Zinc Protease(1367-1376) |
| 531 | 2023531 | 1E-127) >gb\|AAD30573.1\|AC007260_4 (AC007260) 50S Ribosomal protein L13 |
| | | [Arabidopsis thaliana] Length 241 |
| 532 | 2023532 | Pkc_Phospho_Site(53-55) |
| 533 | 2023533 | 4E-57 >sp\|023760\|COMT_CLABR CAFFEIC ACID 3-O- |
| | | METHYLTRANSFERASE (S-ADENOSYSL-L-METHIONINE:CAFFEIC ACID 3-O- |
| | | METHYLTRANSFERASE) (COMT) >gi\|2240207 (AF006009) caffeic acid O- |
| | | methyltransferase [Clarkia breweri] Length = 370 |
| 534 | 2023534 | Tyr_Phospho_Site(884-892) |
| 535 | 2023535 | Pkc_Phospho_Site(55-57) |
| 536 | 2023536 | 6E-16 >gi\|2281649 (AF003105) AP2 domain containing protein |
| | | RAP2.12 [Arabidopsis thaliana] Length = 317 |
| 537 | 2023537 | 6E-34 >emb\|CAB39S33.1\| (AJ223758) 54 kDa vacuolar H(+)-ATPase |
| | | subunit [Sus scrofa] Length = 483 |
| 538 | 2023538 | 3E-19 >ref\|NP005998.1\|PZNF216\| zinc finger protein 216 >gi\|3643809 |
| | | (AF062346) zinc finger protein 216 splice variant 1 [Homo sapiens] >gi\|13643811 |
| | | (AF062347) zinc finger protein 216 splice variant 2 [Homo sapiens] |
| | | >gi\|3668066\|gb\|AA061801.1\| (AF062072) zinc finger protein 216 [Homo sapiens] |
| | | Length = 213 |
| 539 | 2023539 | Zinc_Finger_C3hc4(1254-1263) |
| 540 | 2023S40 | 8E-43 >emb\|CAB40041.1\| (AL049524) alpha NAG [Arabidopsis thaliana] |
| | | Length = 212 |
| 541 | 2023541 | 3E-64 >emb\|CAB53477.1\| (AJ245900) CAA30374.1 protein [Oryza sativa] |
| | | Length = 603 |
| 542 | 2023542 | 1E-93 >pir\|\|S42651 hypothetical protein - rape |
| | | >gi\|16065752\|emb\|CAB58175.1\| (X74225) pod-specific dehydrogenase SAC25 |
| | | [Brassica napus] Length = 320 |
| 543 | 2023543 | 1E-139 >gb\|AAD25850.1\|AC007197_3 (AC007197) cytochrome p450 |
| | | [Arabidopsis thaliana] Length = 518 |
| 544 | 2023644 | 1E-124 >emb\|CAA65988\| (X97323) outward rectifying potassium channel |
| | | KCO1 [Arabidopsis thaliana] >gi\|2230761 \|emb\|CAA69158\| (Y07825) kco1 |
| | | [Arabidopsis thaliana] Length = 363 |
| 545 | 2023545 | Tyr_Phospho_Site(258-265) |
| 546 | 2023546 | 9E-38 >emb\|CAA74000\| (Y13649) homologous to GATA-binding |
| | | transcription factors [Arabidopsis thaliana] |
| | | >gi\|4895246\|gb\|AA032831.1\|AC00765993 (AC007659) GATA-binding |
| | | transcription factor [Arabidopsis thaliana] Le |
| 547 | 2023547 | 1E-124 >gb\|AAD02810\| (AF062396) protein phosphatase 2A regulatory |
| | | subunit isoform B′ delta [Arabidopsis thaliana] Length = 477 |
| 548 | 2023548 | Tyr_Phospho_Site(4-11) |
| 549 | 2023549 | 1E-32 >db\|\|BAA22813\| (026015) CND41, chloroplast nucleoid DNA |
| | | binding protein [Nicotiana tabacum] Length = 502 |
| 550 | 2023550 | 1E-105 >gi\|3860277 (AC005824) ribosomal protein L10 [Arabidopsis |
| | | thaliana] >gi\|4314394\|gb\|AAD15604\| (AC006232) ribosomal protein L10A |
| | | [Arabidopsis thaliana] Length = 222 |
| 551 | 2023551 | 5E-42 >gb\|AAD43442.1\|AF107837\| (AF107837) 26S proteasome subunit p40.5 |
| | | [Homo sapiens] Length = 376 |
| 552 | 2023552 | 1E-68 >emb\|CAB36757.1\| (AL035523) acid phosphatase-like protein |
| | | [Arabidopsis thaliana] Length = 260 |
| 553 | 2023553 | Pkc_Phospho_Site(21-23) |
| 554 | 2023554 | 0 ) >gi\|3482924 (AC003970) Highly similar to cinnamyl alcohol |
| | | dehydrogenase, gi\|1143445[Arabidopsis thaliana] Length = 322 |
| 555 | 2023555 | 4E-94 >gb\|AAD50055.1\|AC007980_20 (AC007980) ATP-dependent |
| | | metalloprotease [Arabidopsis thaliana] Length = 716 |
| 556 | 2023556 | Tyr_Phospho_Site(1518-1526) |
| 557 | 2023557 | Tyr_Phospho_Site(254-262) |
| 558 | 2023558 | 2E-25 >sp\|P355591\|DE_RAT INSULIN-DEGRADING ENZYME (INSULYSIN) |
| | | (INSULINASE) (INSULIN PROTEASE) >gi\|347022\|pir\|\|529509 insulinase (EC |
| | | 3.4.99.45) - rat >gi\|56492\|emb\|CAA47689\| (X67269) insulin-degrading enzyme |
| | | [Rattus norvegic |
| 559 | 2023559 | 1E-44 >emb\|CAA74400.1\| (Y14071) HMG protein [Arabidopsis thaliana] |
| | | >gi 13068715 (AF049236) unknown [Arabidopsis thaliana] Length = 178 |
| 560 | 2023560 | 1E-109 >gi\|2281647 (AF003104) AP2 domain containing protein |
| | | RAP2.11 [Arabidopsis thaliana] Length = 255 |
| 561 | 2023561 | Tyr_Phospho_Site(300-308) |
| 562 | 2023562 | Pkc_Phospho_Site(62-64) |
| 563 | 2023563 | 9E-61 >emb\|CAA71502\| (Y10477) chloroplast thylakoidal processing |
| | | peptidase [Arabidopsis thaliana] Length = 340 |
| 564 | 2023564 | Tyr_Phospho_Site(685-692) |
| 565 | 2023565 | 1E-12 >gi\|3287691 (AC003979) Contains similarity to RING zinc finger |
| | | protein gb\|X95455 from Gallus gallus. [Arabidopsis thaliana] Length = 398 |
| 566 | 2023566 | Rgd(902-904) |
| 567 | 2023567 | Rgd(1696-1698) |
| 568 | 2023568 | 4E-41 >gi\|2462833 (AF000657) highly similar to froha and frohb, |
| | | potential frohc, tumor related protein [Arabidopsis thaliana] Length = 693 |
| 569 | 2023569 | Pkc_Phospho_Site(8-10) |
| 570 | 2023570 | Tyr_Phospho_Site(1252-1259) |
| 571 | 2023571 | 3E-22 >gi\|4091808 (AF053307) deacetylvindoline 4-O-acetyltransferase |
| | | [Catharanthus roseus] Length = 439 |
| 572 | 2023572 | 1E-142 >sp\|P48422\|C86\|ARATH CYTOCHROME P450 86A1 (CYPLXXXVI) |
| | | >gi\|940446\|emb\|CAA62082\| (X90458) cytochrome p450 [Arabidopsis thaliana] |
| | | Length = 513 |
| 573 | 2023573 | 1E-130 ) >gb\|AAD50014.1\|AC0076519 (AC007651) glutathione transferase |
| | | [Arabidopsis thaliana] Length = 220 |
| 574 | 2023574 | 4E-24 >gb\|AAD33602.1\|AF133302_1 (AF133302) type 2 peroxiredoxin [Brassica |
| | | rapa subsp. pekinensis] Length = 162 |
| 575 | 2023575 | 1E-108 >gi\|3860277 (AC005824) ribosomal protein L10 [Arabidopsis |
| | | thaliana] >gi\|4314394\|gb\|AAD15604\| (AC006232) ribosomal protein L10A |
| | | [Arabidopsis thaliana] Length = 222 |
| 576 | 2023576 | Tyr_Phospho_Site(301-308) |
| 577 | 2023577 | 8E-75 >emb\|CAA17547.1\| (AL021960) photosystem II oxygen-evolving |
| | | complex protein 3-like [Arabidopsis thaliana] >gi\|3402748\|emb\|CAA20194.1\| |
| | | (AL031187) photosystem II oxygen-evolving complex protein 3-like [Arabidopsis |
| | | thaliana] Length = 223 |
| 578 | 2023578 | Tyr_Phospho_Site(49-56) |
| 579 | 2023579 | 1E-83 >emb\|CAA18743.1\| (AL022604) NAD+ dependent isocitrate |
| | | dehydrogenase subunit 1 [Arabidopsis thaliana] Length = 367 |
| 580 | 2023580 | Pkc_Phospho_Site(2-4) |
| 581 | 2023581 | 5E-40 >pir\|\|552995 arabinogalactan-like protein - loblolly pine >gi\|607774 |
| | | (U09556) arabinogalactan-like protein [Pinus taeda] Length = 264 |
| 582 | 2023582 | 4E-23 >emb\|CAA10616\| (AJ132240) eukaryotic translation initiation factor |
| | | 5 [Zea mays] Length = 451 |
| 583 | 2023583 | 2E-65 >sp\|P29545\|EF1D_ORYSA ELONGATION FACTOR 1-BETA′ (EF-1- |
| | | BETA′) >gi\|322851\|pir\|\|529224 translation elongation factor eEF-1 beta′ chain - |
| | | rice >gi\|218161\|dbj\|BAA02253\| (D12821) elongation factor I beta40 [Oryza sativa] |
| | | Length = 223 |
| 584 | 2023584 | 1E-36 >gb\|AAF00645.1\|AC009540_22 (AC009540) cationic amino acid |
| | | transporter [Arabidopsis thaliana] Length = 614 |
| 585 | 2023585 | 1E-123 >gi\|3152563 (AC002986) Similar to myb-related transcription |
| | | factors e.g., gb\|X98308. EST gb\|T22093 and gb\|T22697 come from this gene. |
| | | [Arabidopsis thaliana] Length = 327 |
| 586 | 2023586 | 9E-13 >emb\|CAB1022l.1\| (Z97336) elicitor like protein [Arabidopsis |
| | | thaliana] Length = 158 |
| 587 | 2023587 | 1E-100 >gb\|AAD35009.1\|AF14439_1 (AF144391) thioredoxin-like 5 |
| | | [Arabidopsis thaliana] Length = 185 |
| 588 | 2023588 | Rgd(1535-1537) |
| 589 | 2023589 | 1E-105 >gi\|2262173 (AC002329) NADPH thioredoxin reductase |
| | | [Arabidopsis thaliana] Length = 383 |
| 590 | 2023590 | Tyr_Phospho_Site(1491-1497) |
| 591 | 2023591 | Tyr_Phospho_Site(966-972) |
| 592 | 2023592 | 2E-56 >sp\|Q06138\|MO25_MOUSE MO25 PROTEIN >gi\|2143483\|pir\|\|157997 |
| | | hypothetical calcium-binding protein - mouse >gi\|262934\|bbs\|121784 (S51858) |
| | | Ca2+ binding protein [mice, embryos, Peptide, 341 aa] [Mus sp.] Length = 341 |
| 593 | 2023593 | 4E-99 >gi\|3822225 (AF079183) RING-H2 finger protein RHG1a |
| | | [Arabidopsis thaliana] Length = 190 |
| 594 | 2023594 | 5E-98 ) >dbj\|BAA3\|144\| (AB010916) responce reactor2 [Arabidopsis |
| | | thaliana] >gi\|4678318\|emb\|CAB41129.1\| (AL049658) responce reactor2 |
| | | [Arabidopsis thaliana] Length = 184 |
| 595 | 2023595 | 1E-122 >gi\|1046225 (U21952) ethylene response sensor [Arabidopsis |
| | | thaliana] >gi\|2623308 (AC002409) ethylene response sensor (ERS) [Arabidopsis |
| | | thaliana] >gi\|1584365\|prf\|\|2122405A ERS gene [Arabidopsis thaliana] Length |
| | | 613 |
| 596 | 2023596 | 3E-28 >gi\|2494114 (AC002376) Contains similarity to Daucus glycine- |
| | | rich cell wall protein (gb\|D29974). EST gb\|R29840 comes from this gene. |
| | | [Arabidopsis thaliana] Length = 212 |
| 597 | 2023597 | Tyr_Phospho_Site(780-786) |
| 598 | 2023598 | 2E-80 ) >emb\|CAA09\|98\| (AJ010459) RNA helicase [Arabidopsis |
| | | thaliana] Length = 145 |
| 599 | 2023599 | 7E-27 >gb\|AAD46402.1\|AF096246\| (AF096246) ethylene-responsive |
| | | transcriptional coactivator [Lycopersicon esculentum] Length = 146 |
| 600 | 2023600 | Pkc_Phospho_Site(151-153) |
| 601 | 2023601 | 2E-82 >gb\|AAD27618.1\|AF124376\| (AF124376) 30S ribosomal protein S7 |
| | | [Brassica napus] >gi\|5881740\|dbj\|BAA84431.1\| (AP000423) ribosomal protein S7 |
| | | [Arabidopsis thaliana] >gi\|5881755\|dbj\|BAA84446.1\| (AP000423) ribosomal protein |
| | | S7 [Arabidopsis thaliana] Length = 155 |
| 602 | 2023602 | 2E-79 >gb\|AAD\|4462\| (A0005275) glycosylation enzyme [Arabidopsis |
| | | thaliana] Length = 448 |
| 603 | 2023603 | 4E-98 >dbj\|BAA745281 (AB016471) ARRi protein [Arabidopsis thaliana] |
| | | Length = 669 |
| 604 | 2023604 | 5E-74 >9113169883 (AF033194) dehydroquinate |
| | | dehydratase/shikimate:NADP oxidoreductase [Lycopersicon esculentum] |
| | | >gi\|3169888 (AF034411) dehydroquinate dehydratase/shikimate:NADP |
| | | oxidoreductase [Lycopersicon esculentum] Length = 545 |
| 605 | 2023605 | Tyr_Phospho_Site(382-390) |
| 606 | 2023606 | Tyr_Phospho_Site(1085-1092) |
| 607 | 2023607 | Tyr_Phospho_Site(538-545) |
| 608 | 2023608 | 2E-69 >gb\|AAD21 706.\| (AC007048) tyrosine transaminase [Arabidopsis |
| | | thaliana] Length = 462 |
| 609 | 2023609 | Tyr_Phospho_Site(216-223) |
| 610 | 2023610 | Pkc_Phospho_Site(10-12) |
| 611 | 2023611 | 1E-35 >gb\|AAD45979.1\| (AF115334) MenG [Pseudomonas fluorescens] |
| | | Length = 163 |
| 612 | 2023612 | 9E-23 >dbj\|BAA32422\| (AB008107) ethylene responsive element binding |
| | | factor 5 [Arabidopsis thaliana] Length = 300 |
| 613 | 2023613 | 2E-90 >pir\|\|S71219 cytosolic cyclophilin ROC3- Arabidopsis thaliana |
| | | >gi\|1305455 (U40399) cytosolic cyclophilin [Arabidopsis thaliana] |
| | | >gi 14581104\|gb\|AAD24594.1\|AC0058259 (AC005825) cytosolic cyclophil in |
| | | (ROC3) [Arabidopsis thaliana] Length = 173 |
| 614 | 2023614 | Tyr_Phospho_Site(78-86) |
| 615 | 2023615 | Pkc_Phospho_Site(12-14) |
| 616 | 2023616 | Tyr_Phospho_Site(772-780) |
| 617 | 2023617 | 1E-106 >emb\|CAB45054.1\| (AL078637) HSP90-like protein [Arabidopsis |
| | | thaliana] Length = 623 |
| 618 | 2023618 | 1E-101) >gi\|4056469 (AC005990) Strong similarity to gb\|M95166 ADP- |
| | | ribosylation factor from Arabidopsis thaliana. ESTs gb\|Z25826, gb\|R90191, |
| | | gb\|N65697, gb\|AA713150, gb″T46332, gb\|AA040967, gb\|AA712956, gb\|T46403, |
| | | gb\|T46050, gb\|A1100391 and gb\|Z25043 come from t . . . Length 188 |
| 619 | 2023619 | Tyr_Phospho_Site(9-16) |
| 620 | 2023620 | 3E-44 >gi\|3201632 (AC004669) 2A6 protein [Arabidopsis thaliana] |
| | | Length = 358 |
| 621 | 2023621 | 1E-113 >emb\|CAB10222.1\| (Z97336) carnitine racemase like protein |
| | | [Arabidopsis thaliana] Length = 240 |
| 622 | 2023622 | 1E-63 >gi\|3341698\| (AC003672) blue copper-binding protein II |
| | | [Arabidopsis thaliana] Length = 202 |
| 623 | 2023623 | 1E-108 >5p\|Q96558\|UGDH_SOYBN UDP-GLUCOSE 6-DEHYDROGENASE |
| | | (UDP-GLC DEHYDROGENASE) (UDP-GLCDH) (UDPGDH) >gi\|1518540 |
| | | (U5341 8) UDP-glucose dehydrogenase [Glycine max] Length = 480 |
| 624 | 2023624 | Tyr_Phospho_Site(515-522) |
| 625 | 2023625 | Tyr_Phospho_Site(1716-1723) |
| 626 | 2023626 | 2E-16 >emb\|CAA84724.1\| (Z35663) similar to ribonuleoprotein; cDNA EST |
| | | yk222a11.3 comes from this gene; cDNA EST yk222a11.5 comes from this gene; |
| | | cDNA EST yk432f10.3 comes from this gene; cDNA EST yk432f10.5 comes from |
| | | this gene; cDNA EST yk497a8.3 . . . Length = 307 |
| 627 | 2023627 | 2E-57 >gi\|3482933 (AC003970) Similar to cdc2 protein kinases |
| | | [Arabidopsis thaliana] Length = 967 |
| 628 | 2023628 | Tyr_Phospho_Site(4-12) |
| 629 | 2023629 | 4E-92 >gi\|3201969 (AF068332) submergence induced protein 2A [Oryza |
| | | sativa Length = 198 |
| 630 | 2023630 | 1E-110 >gb\|AAD41977.1\|AC0064389 (AC006438) unknown protein |
| | | [Arabidopsis thaliana] Length = 203 |
| 631 | 2023631 | Tyr_Phospho_Site(983-990) |
| 632 | 2023632 | 1E-106 ) >9113482931 (AC003970) germin-like protein [Arabidopsis |
| | | thaliana] Length = 219 |
| 633 | 2023633 | 4E-68 >gi\|4193388 (AF091455) translationally controlled tumor protein |
| | | [Hevea brasiliensis] Length = 168 |
| 634 | 2023634 | 5E-23 >gi\|3193325 (AF069299) contains similarity to pectinesterases |
| | | [Arabidopsis thaliana] Length = 209 |
| 635 | 2023635 | 2E-45 >emb\|CAB52425.1\| (AL109770) similar to yeast vacuolar sorting |
| | | protein VPS29\|PEP11 [Schizosaccharomyces pombe] Length = 187 |
| 636 | 2023636 | 9E-16 >5p\|P53173\|ERV_YEAST ER-DERIVED VESICLES PROTEIN ERV14 |
| | | >gi\|2132531\|pir\|\|564058 probable membrane protein YGL054c - yeast |
| | | (Sacoharomyces cerevisiae) >gi\|1322550\|emb\|CAA96756\| (Z72576) ORF |
| | | YGL054c [Saccharomyces cerevisiae] Length = 138 |
| 637 | 2023637 | 1E-126 >gi\|3415113 (AF081201) villin 1 [Arabidopsis thaliana] Length = |
| | | 910 |
| 638 | 2023638 | 1E-125 >pir\|\|558282 dTDP-glucose 4-6-dehydratases homolog - |
| | | Arabidopsis thaliana >gi\|928932\|emb\|CAA89205\| (Z49239) homolog of dTDP- |
| | | glucose 4-6-dehydratases [Arabidopsis thaliana] >gi Ii 585435\|prf\|\|2124427B |
| | | diamide resistance gene [Arabidopsis thaliana] Length = 445 |
| 639 | 2023639 | Tyr_Phospho_Site(1102-1110) |
| 640 | 2023640 | 2E-30 >sp\|Q01264\|HYUC_PSESN HYDANTOIN UTILIZATION PROTEIN C |
| | | (ORF4) >gi\|151284 (M72717) DL-hydantoinase [Pseudomonas sp.] |
| | | >gi 121 6833\|dbj\|BAA01379\|(D10494) N-carbamyl-L-amino acid amidohydrolase |
| | | [Pseudomonas sp.] Length = 414 |
| 641 | 2023641 | Tyr_Phospho_Site(127-134) |
| 642 | 2023642 | Tyr_Phospho_Site(407-413) |
| 643 | 2023643 | 1E-155 >gb\|AAD21710.1\| (AC007048) protein phosphatase 2C |
| | | [Arabidopsis thaliana] Length = 290 |
| 644 | 2023644 | 4E-97 >gi\|862640 (U20182) MADS-box protein AGL11 [Arabidopsis |
| | | thaliana] >gi\|4538999\|emb\|CAB39620.1\| (AL049481) MADS-box protein AGL11 |
| | | [Arabidopsis thaliana] Length = 230 |
| 645 | 2023645 | 1E-127 >gi\|3894171 (AC005312) glutathione s-transferase [Arabidopsis |
| | | thaliana] Length = 221 |
| 646 | 2023646 | 1E-120 >sp\|Q39222\|RB1B_ARATH RAS-RELATED PROTEIN RAB11 |
| | | >9112118459\|pir\|\|59942 small GTP-binding protein Rabi 1- Arabidopsis thaliana |
| | | >gi\|451860 (L18883) small GTP-binding protein [Arabidopsis thaliana] Length = |
| | | 216 |
| 647 | 2023647 | Tyr_Phospho_Site(162-168) |
| 648 | 2023648 | 7E-29 >dbj\|BAA22813\| (026015) CND41, chloroplast nucleold DNA |
| | | binding protein [Nicotiana tabacum] Length = 502 |
| 649 | 2023649 | 1E-34 >dbj\|BAA12797\| (085381) cytochrome c oxidase subunit Vb |
| | | precursor [Oryza sativa] Length = 169 |
| 650 | 2023650 | Pkc_Phospho_Site(60-62) |
| 651 | 2023651 | Tyr_Phospho_Site(927-934) |
| 652 | 2023652 | 1E-128 >gb\|AAD20681\| (AC006283) similar to protein Htf9C [Arabidopsis |
| | | thaliana] Length = 850 |
| 653 | 2023653 | 1E-117 >gb\|AAD22643.1\|AC0071387 (AC007138) protein transport factor |
| | | [Arabidopsis thaliana] Length = 856 |
| 654 | 2023654 | Tyr_Phospho_Site(951-957) |
| 655 | 2023655 | Pkc_Phospho_Site(31-33) |
| 656 | 2023656 | 8E-23 >emb\|CAB50433.1\| (AJ248287) hypothetical DEHYDROGENASE |
| | | [Pyrococcus abyssi] Length = 333 |
| 657 | 2023657 | 1E-129 >sp\|Q08770\|RL10_ARATH 60S RIBOSOMAL PROTEIN L10 (WILM'S |
| | | TUMOR SUPPRESSOR PROTEIN HOMOLOG) >gi\|478401\|pir\|\|JQ2244 |
| | | ribosomal protein L10.e, cytosolic- Arabidopsis thaliana |
| | | >gi\|17682\|emb\|CAA788561 (Z15157) Wilm's tumor suppressor homologue |
| | | [Arabidopsis thaliana] Length = 220 |
| 658 | 2023658 | 6E-22 >gb\|AAD32844.1 1AC007658_3 (AC007658) thioredoxin-like protein |
| | | [Arabidopsis thaliana] Length = 130 |
| 659 | 2023659 | 1E-141 >emb\|CAB41166.1\| (AL049659) cytochrome P450-like protein |
| | | [Arabidopsis thaliana] Length = 490 |
| 660 | 2023660 | Pkc_Phospho_Site(177-179) |
| 661 | 2023661 | 7E-92 >gi\|4056504 (AC005896) zinc finger protein [Arabidopsis thaliana] |
| | | Length = 178 |
| 662 | 2023662 | Tyr_Phospho_Site(441-448) |
| 663 | 2023663 | Tyr_Phospho_Site(1407-1415) |
| 664 | 2023664 | 2E-60 >gi\|1532175 (U63815) similar to protein disulfide isomerase |
| | | [Arabidopsis thaliana] Length = 132 |
| 665 | 2023665 | 1E-128 >emb\|CAB10215.1\| (Z97336) ankyrin like protein [Arabidopsis |
| | | thaliana] Length = 936 |
| 666 | 2023666 | Tyr_Phospho_Site(764-772) |
| 667 | 2023667 | 1E-107 >emb\|CAB52747.1\| (AJ245629) photosystem I subunit III precursor |
| | | [Arabidopsis thaliana] Length = 221 |
| 668 | 2023668 | Tyr_Phospho_Site(146-152) |
| 669 | 2023669 | 1E-112 >gi\|3065835 (AF058800) methyltransferase [Arabidopsis |
| | | thaliana] Length = 504 |
| 670 | 2023670 | Tyr_Phospho_Site(910-918) |
| 671 | 2023671 | Tyr_Phospho_Site(1058-1064) |
| 672 | 2023672 | Tyr_Phospho_Site(377-383) |
| 673 | 2023673 | 2E-33 >gi\|4097549 (U64907) ATFP4 [Arabidopsis thaliana] Length = |
| | | 179 |
| 674 | 2023674 | 1E-119 >sp\|P41916\|RAN1_ARATH GTP-BINDING NUCLEAR PROTEIN |
| | | RAN-1 >gi\|495729 (L16789) small ras-related protein [Arabidopsis thaliana] |
| | | >gi\|2058278\|emb\|CAA66047\| (X97379) atrani [Arabidopsis thaliana] Length = 221 |
| 675 | 2023675 | 1E-105 >sp\|P22953\|HS71_ARATH HEAT SHOCK COGNATE 70 KD |
| | | PROTEIN 1 >gi\|1072473\|pir\|\|S46302 heat shock cognate protein 70-1 - |
| | | Arabidopsis thaliana >gi\|397482\|emb\|CAA52684\| (X74604) heat shock protein 70 |
| | | cognate [Arabidopsis thaliana] Length = 651 |
| 676 | 2023676 | 2E-89 >gb\|AAD39282.1\|AC007576_5 (AC007576) Similar to DNA-binding |
| | | proteins [Arabidopsis thaliana] Length = 487 |
| 677 | 2023677 | 1E-127 >gi\|4056505 (AC005896) nodulin-like protein [Arabidopsis |
| | | thaliana] Length = 357 |
| 678 | 2023678 | 1E-135 >gi\|886116 (U27609) TCH4 protein [Arabidopsis thaliana] |
| | | >gi\|2952473 (AF051338) xyloglucan endotransglycosylase related protein |
| | | [Arabidopsis thaliana] Length = 284 |
| 679 | 2023679 | 2E-90 >sp\|023255\|SAHH_ARATH ADENOSYLHOMOCYSTEINASE (8- |
| | | ADENOSYL-L-HOMOCYSTEINE HYDROLASE) (ADOHCYASE) |
| | | >gi\|2244750\|emb\|CAB10173.1\| (Z97335) adenosylhomocysteinase [Arabidopsis |
| | | thaliana] >gi\|3088579\|gb\|AAC14714.1\| (AF059581) S-adenosyl-L-homocysteine |
| | | hydrolase [Arabidopsis thaliana] Length = 485 |
| 680 | 2023680 | 9E-23 >dbj\|BAA32422\| (AB008107) ethylene responsive element binding |
| | | factor 5 [Arabidopsis thaliana] Length = 300 |
| 681 | 2023681 | Tyr_Phospho_Site(304-312) |
| 682 | 2023682 | Tyr_Phospho_Site(654-660) |
| 683 | 2023683 | 2E-58 >sp\|Q43434\|VATL_GOSHI VACUOLAR ATP SYNTHASE 16 KD |
| | | PROTEOLIPID SUBUNIT >gi\|755148 (U13669) vacuolar H+-ATPase proteolipid |
| | | (16 kDa) subunit [Gossypium hirsutum] >gi\|4519415\|dbi\|BAA75542.1\|(AB024275) |
| | | vacuolar H+-ATPase c subunit [Citrus unshiu] Length = 165 |
| 684 | 2023684 | 1E-106 >pir\|\|550767 protein kinase - rice >gi\|450300 (L27821) protein |
| | | kinase [Oryza sativa] Length = 824 |
| 685 | 2023685 | 6E-14 >sp\|Q2889\|S5A1_MACFA 3-OXO-5-ALPHA-STEROID 4- |
| | | DEHYDROGENASE 1 (STEROID 5-ALPHA-REDUCTASE 1) (SR TYPE 1) |
| | | >gi\|999036\|bbs\|164548 (S77162) steroid 5 alpha-reductase type I isoenzyme, SR |
| | | type 1 [Cynomolgus monkeys, prostate, Peptide, 263 aa] [Macaca fascicularis] |
| | | Length = 263 |
| 686 | 2023686 | 1E-131 >gb\|AAC34217.1\| (AC004411) alcohol dehydrogenase |
| | | [Arabidopsis thaliana] Length = 257 |
| 687 | 2023687 | Tyr_Phospho_Site(146-152) |
| 688 | 2023688 | 2E-72 >emb\|CAB44322.1\| (AL078606) phospholipase D-gamma |
| | | [Arabidopsis thaliana] Length = 866 |
| 689 | 2023689 | 8E-97 >emb\|CAB53034.1\| (AJ245867) photosystem I subunit XI precursor |
| | | [Arabidopsis thaliana] Length = 219 |
| 690 | 2023690 | 1E-133 >sp\|080585\|MTHR_ARATH PROBABLE |
| | | METHYLENETETRAHYDROFOLATE REDUCTASE >gi\|3212869 (AC004005) |
| | | unknown protein [Arabidopsis thaliana] Length = 606 |
| 691 | 2023691 | Tyr_Phospho_Site(501-508) |
| 692 | 2023692 | 6E-26 >gb\|AAD400\|7.1\|AF150111_1 (AF150111) small zinc finger-like protein |
| | | [Arabidopsis thaliana] Length = 93 |
| 693 | 2023693 | 1E-101) >gi\|4056469 (AC005990) Strong similarity to gb\|M95166 ADP- |
| | | ribosylation factor from Arabidopsis thaliana. ESTs gb\|Z25826, gb\|R90191, |
| | | gb\|N65697, gb\|AA713150, gb\|T46332, gb\|AA040967, gb\|AA7l 2956, gb\|T46403, |
| | | gb\|T46050, gb\|A1100391 and gb\|Z25043 come from t . . . Length = 188 |
| 694 | 2023694 | Zinc Protease(160-169) |
| 695 | 2023695 | 3E-94 >emb\|CAB36847.1\| (AL035528) DnaJ-like protein [Arabidopsis |
| | | thaliana] Length = 197 |
| 696 | 2023696 | Tyr_Phospho_Site(1062-1069) |
| 697 | 2023697 | 1E-83 >sp\|P35132\|UBC9_ARATH UBIQUITIN-CONJUGATING ENZYME E2- |
| | | 17 KD 9 (UBIQUITIN-PROTEIN LIGASE 9) (UBIQUITIN CARRIER PROTEIN 9) |
| | | (UBCAT4B) >gi\|421857\|pir\|\|S32674 ubiquitin-protein ligase (EC 6.3.2.19) UBC9 |
| | | - Arabidopsis thaliana >gi\|297884\|emb\|CAA78714\| (Z14990) ubiquitin conjugating |
| | | enzyme homolog [Arabidopsis thaliana] >gi\|349211 (L00639) ubiquitin conjugating |
| | | enzyme [Arabidopsis thaliana] >gi\|600391\|emb\|CAA51201\| (X72626) ubiquitin |
| | | conjugating enzyme E2 [Arabidopsis thaliana] >gi\|4455355\|emb\|CAB36765.1\| |
| | | (AL035524) ubiguitin-protein ligase UBC9 [Arabidopsis thaliana] Length = 148 |
| 698 | 2023698 | 2E-47 >emb\|CAA09200\| (AJ010461) RNA helicase [Arabidopsis thaliana] |
| | | Length = 363 |
| 699 | 2023699 | Tyr_Phospho_Site(1315-1322) |
| 700 | 2023700 | 3E-86 >gb\|AAD22122.1\|AC0062244 (AC006224) isopropylmalate dehydratase |
| | | [Arabidopsis thaliana] Length = 256 |
| 701 | 2023701 | 9E-11 >pir\|\|559397 probable membrane protein YLR251w - yeast |
| | | (Saccharomyces cerevisiae) >gi\|662333 (U20865) YIr251wp [Saccharomyces |
| | | cerevisiae] Length = 197 |
| 702 | 2023702 | 1E-113 >sp\|023755\|EF2_BETVU ELONGATION FACTOR 2 (EF-2) |
| | | >gi\|2369714\|emb\|CAB09900\| (Z971 78) elongation factor 2 [Beta vulgaris] Length = |
| | | 843 |
| 703 | 2023703 | 8E-46 >pir\|\|A39634 probable cell cycle control protein cm - fruit fly |
| | | (Drosophila melanogaster) >gi\|2827496\|emb\|CAA15705.1\| (AL009195) |
| | | EG:30B8.1 [Drosophila melanogaster] Length = 702 |
| 704 | 2023704 | Tyr_Phospho_Site(1307-1314) |
| 705 | 2023705 | 1E-145 >gb\|AAD46682.1\|AF170910_1 (AF170910) SYNC2 protein [Arabidopsis |
| | | thaliana] Length = 638 |
| 706 | 2023706 | 1E-65 >gi\|3341698 (AC003672) blue copper-binding protein II |
| | | [Arabidopsis thaliana] Length = 202 |
| 707 | 2023707 | Rgd(993-995) |
| 708 | 2023708 | Tyr_Phospho_Site(94-101) |
| 709 | 2023709 | Tyr_Phospho_Site(1050-1057) |
| 710 | 2023710 | 1E-107 >gb\|AAD39612.1\|AC007454_11 (AC007454) Similar to gb\|X92204 NAM |
| | | gene product from Petunia hybrida. ESTs gb\|H36656 and gb\|AA651216 come |
| | | from this gene. [Arabidopsis thaliana] Length = 557 |
| 711 | 2023711 | 7E-88 >gb\|AAD27909.1\|AC007213_7 (AC007213) receptor protein kinase |
| | | [Arabidopsis thaliana] Length 851 |
| 712 | 2023712 | 2E-89 >dbj\|BAA18577\| (090915) peptide chain release factor |
| | | [Synechocystis sp.] Length = 288 |
| 713 | 2023713 | 4E-54 >gb\|AAD21451.1\| (AC007017) DNA-binding protein [Arabidopsis |
| | | thaliana] Length = 145 |
| 714 | 2023714 | Tyr_Phospho_Site(7-14) |
| 715 | 2023715 | Tyr_Phospho_Site(467-473) |
| 716 | 2023716 | Tyr_Phospho_Site(185-191) |
| 717 | 2023717 | 6E-48 >gb\|AAD39312.1\|AC007258_1 (AC007258) Similar to glutathione |
| | | transferase [Arabidopsis thaliana] Length = 234 |
| 718 | 2023718 | 8E-17 >sp\|Q42534\|PME2_ARATH PECTINESTERASE 2 (PECTIN |
| | | METHYLESTERASE 2) (PE 2) >gi\|2129667\|pir\|\|PC4168 pectinesterase (EC |
| | | 3.1.1.11) 2 precursor- Arabidopsis thaliana (fragment) >gi\|903894 (U25649) |
| | | ATPME2 precursor [Arabidopsis thaliana] Length = 582 |
| 719 | 2023719 | Tyr_Phospho_Site(1205-1211) |
| 720 | 2023720 | Tyr_Phospho_Site(297-304) |
| 721 | 2023721 | 1E-103 >sp\|Q96252\|ATP4_ARATH ATP SYNTHASE DELTA′ CHAIN, |
| | | MITOCHONDRIAL PRECURSOR >gi\|1655484\|dbj\|BAA136011(088376) delta- |
| | | prime subunit of mitochondrial F1-ATPase [Arabidopsis thaliana] Length = 203 |
| 722 | 2023722 | 9E-59 >emb\|CAB39656.1\| (AL049483) nitrogen fixation like protein |
| | | [Arabidopsis thaliana] Length = 224 |
| 723 | 2023723 | 2E-27 >gi\|2984333 (AE000774) Na(+) dependent transporter (Sbf |
| | | family) [Aguifex aeolicus] Length = 297 |
| 724 | 2023724 | Tyr_Phospho_Site(780-786) |
| 725 | 2023725 | 2E-45 >gb\|AAD22286.1\|AC006920 _10 (AC006920) reverse transcriptase |
| | | [Arabidopsis thaliana] Length = 1311 |
| 726 | 2023726 | 4E-44 >emb\|CAA63223\| (X92491) TOM20 [Solanum tuberosum] Length = |
| | | 204 |
| 727 | 2023727 | 1E-23 >emb\|CAB10456.1\| (Z97342) nuclear antigen homolog [Arabidopsis |
| | | thaliana] Length = 355 |
| 728 | 2023728 | 1E-82 >dbj\|BAA06384\| (030719) ERD15 protein [Arabidopsis thaliana] |
| | | >gi\|3241941 (AC004625) dehydration-induced protein ERD15 [Arabidopsis |
| | | thaliana] >gi\|3894181 (AC005662) ERD15 protein [Arabidopsis thaliana] Length = |
| | | 163 |
| 729 | 2023729 | 6E-24 >gb\|AAD24601.1\|AC0058258 (AC005825) reverse transcriptase |
| | | [Arabidopsis thaliana] Length = 1319 |
| 730 | 2023730 | 1E-36 >emb\|CAB16764.1\| (Z99707) heat shock transcription factor HSF4 |
| | | [Arabidopsis thaliana] >gi\|3256070\|emb\|CAA74398\| (Y14069) Heat Shock Factor |
| | | 4 [Arabidopsis thaliana] Length = 284 |
| 731 | 2023731 | 1E-68 >gb\|AAD25624.1\|AC005287_26 (AC005287) Similar to phosphoprotein |
| | | phosphatase 2A regulatory subunit [Arabidopsis thaliana] Length = 535 |
| 732 | 2023732 | 1E-114 >gb\|AAD41426.11AC007727_15 (AC007727) Identical to gb\|Y13173 |
| | | Arabidopsis thaliana mRNA for proteasome subunit. EST gb\|T76747 comes from |
| | | this gene. Length = 204 |
| 733 | 2023733 | 1E-105) >sp\|P41127\|RL13_ARATH 60S RIBOSOMAL PROTEIN L13 (BBC1 |
| | | PROTEIN HOMOLOG) >gi\|480787\|pir\|\|537271 ribosomal protein L13 - |
| | | Arabidopsis thaliana >gi\|404166\|emb\|CAA53005\| (X75162) BBC1 protein |
| | | [Arabidopsis thaliana] Length = 206 |
| 734 | 2023734 | Tyr_Phospho_Site(199-205) |
| 735 | 2023735 | 4E-41 >emb\|CAB44393.1\| (AL078610) hydrolase [Streptomyces coelicolor] |
| | | Length = 269 |
| 736 | 2023736 | 5E-29 >gb\|AAD56248.1\|AF1862739 (AF186273) leucine-rich repeats containing |
| | | F-box protein FBL3 [Homo sapiens] Length = 423 |
| 737 | 2023737 | Tyr_Phospho_Site(1188-1195) |
| 738 | 2023738 | 5E-63 >gi\|3834306 (AC005679) EST gb\|R65024 comes from this gene. |
| | | [Arabidopsis thaliana] Length = 156 |
| 739 | 2023739 | 1E-78 >gi\|1707018 (U78721) CutA isolog [Arabidopsis thaliana] Length = |
| | | 182 |
| 740 | 2023740 | 1E-164 >gb\|AAD17364\| (AF128396) Arabidopsis thaliana flavin-type blue- |
| | | light photoreceptor (SW:Q43125) (Pfam: PF00875, Score = 765.2, E = 2.6e-226, |
| | | N = 1) [Arabidopsis thaliana] Length = 702 |
| 741 | 2023741 | 9E-14 >ref\|NP_003913.1\|PHERC1\| guanine nucleotide exchange factor p532 |
| | | >gi\|1477565 (U50078) p532 [Homo sapiens] Length = 4861 |
| 742 | 2023742 | 1E-133 >emb\|CAA65053\| (X95738) proline transporter 2 [Arabidopsis |
| | | i thaliana] Length = 439 |
| 743 | 2023743 | 6E-93 >gb\|AAD39312.1\|AC007258_1 (AC007258) Similar to glutathione |
| | | transferase [Arabidopsis thaliana] Length = 234 |
| 744 | 2023744 | Tyr_Phospho_Site(748-755) |
| 745 | 2023745 | 1E-120 >gb\|AAC24832\| (AF061518) manganese superoxide dismutase |
| | | [Arabidopsis thaliana] Length = 231 |
| 746 | 2023746 | 3E-83 >emb\|CAB45986.1\| (AL080318) protein [Arabidopsis thaliana] |
| | | Length = 206 |
| 747 | 2023747 | 3E-22 >gi\|895613 (L43505) CASP gene product [Gallus gallus] Length = |
| | | 675 |
| 748 | 2023748 | 4E-39 >gb\|AAD21699.1\| (AC004793) Contains reverse transcriptase |
| | | domain (rvt) PF100078.\|[Arabidopsis thaliana] Length = 1253 |
| 749 | 2023749 | 1E-124 >emb\|CAA19720.1\| (AL030978) GH3 like protein [Arabidopsis |
| | | thaliana] Length = 612 |
| 750 | 2023750 | 1E-69 >emb\|CAB36546.1\| (AL035440) DNA binding protein [Arabidopsis |
| | | thaliana] Length = 427 |
| 751 | 2023751 | 3E-75 ) >gi\|1707022 (U78721) proline-rich protein isolog [Arabidopsis |
| | | thaliana] Length = 239 |
| 752 | 2023752 | 1E-122 >gb\|AAD17428\| (AC006284) methyltransferase [Arabidopsis |
| | | thaliana] Length = 619 |
| 753 | 2023753 | 3E-15 >gi\|2252854 (AF013294) similar to auxin-induced protein |
| | | [Arabidopsis thaliana] Length = 122 |
| 754 | 2023754 | 1E-101 >gi\|2444176 (U94782) unconventional myosin [Helianthus |
| | | annuus] Length = 1260 |
| 755 | 2023755 | Tyr_Phospho_Site(661-668) |
| 756 | 2023756 | 7E-97 >gb\|AAD15400\| (AC006223) integral membrane protein |
| | | [Arabidopsis thaliana] Length = 429 |
| 757 | 2023757 | 1E-120 >sp\|P42761\|GTH3_ARATH GLUTATHIONE S-TRANSFERASE |
| | | ERD13 (GST CLASS PHI) >gi\|481822\|pir\|\|539542 probable glutathione |
| | | transferase (EC 2.5.1.18) (clone ERD13)- Arabidopsis thaliana |
| | | >gi\|497789\|db\|1BAA04554\| (D17673) glutathio |
| 758 | 2023758 | 1E-114 ) >gi\|1707015 (U78721) protein phosphatase 2C isolog |
| | | [Arabidopsis thaliana] Length = 380 |
| 759 | 2023759 | 1E-108 >gb\|AAD24598.1\|AC005825_5 (AC005825) chloroplast outer membrane |
| | | protein 86, also very similar to GTP-inding protein from pea (GB:L36857) |
| | | [Arabidopsis thaliana] Length = 1206 |
| 760 | 2023760 | 1E-82 >emb\|CAA16964\| (AL021811) H+-transporting ATP synthase |
| | | chain9 - like protein [Arabidopsis thaliana] >gi\|5730141\|emb\|CAB52473.1\| |
| | | (AJ245574) ATP synthase beta chain precursor (subunit II) [Arabidopsis thaliana] |
| | | Length = 219 |
| 761 | 2023761 | 3E-47 >emb\|CAA68B48\| (Y07563) hin1 [Nicotiana tabacum] Length = 221 |
| 762 | 2023762 | 9E-51 >sp\|P28342\|GTT1_DIACA GLUTATHIONE S-TRANSFERASE 1 (SR8) |
| | | (GST CLASS-THETA) >gi\|99589\|pir\|\|516604 glutathione transferase (EC 2.5.1.18) |
| | | CARSR8 - clove pink >gi\|18330\|emb\|CAA41279\| (X58390) glutathione 5- |
| | | transferase [Dianthus caryophyllus] >gi\|167968 (M64268) glutathione transferase |
| | | [Dianthus caryophyllus] Length = 221 |
| 763 | 2023763 | Tyr_Phospho_Site(192-199) |
| 764 | 2023764 | Tyr_Phospho_Site(1388-1396) |
| 765 | 2023765 | 1E-38 >emb\|CAB40579A\| (AJ133639) SAH7 protein [Arabidopsis thaliana] |
| | | Length = 159 |
| 766 | 2023766 | 4E-17 >ref \|NP_003554.1\|PSPOP\| speckle-type POZ protein |
| | | >gi\|2695708\|emb\|CAA04199\| (AJ000644) SPOP [Homo sapiens] Length = 374 |
| 767 | 2023767 | Pkc_Phospho_Site(22-24) |
| 768 | 2023768 | 3E-31 >sp\|P81650\|BGAL_PSBAT BETA-GALACTOSIDASE (LACTASE) |
| | | >gi\|4079639\|emb\|CAA10470\| (AJ131635) beta-galactosidase [psychrophilic |
| | | bacterium TAE 79] Length = 1039 |
| 769 | 2023769 | 1E-123 >gi\|871782 (L43081) pEARL14 gene product [Arabidopsis |
| | | thaliana] Length = 766 |
| 770 | 2023770 | 2E-77 >gi\|3386612 (AC004665) DNA-binding protein, dbp [Arabidopsis |
| | | thaliana] Length = 190 |
| 771 | 2023771 | 1E-29 >sp\|P42763\|DH14_ARATH DEHYDRIN ERD14 |
| | | >gi\|556474\|dbj\|BAA045691 (D17715) ERD14 protein [Arabidopsis thaliana] Length = |
| | | 185 |
| 772 | 2023772 | 8E-13 >emb\|CAA88860.1\| (Z49068) similar to GTP-binding protein; cDNA |
| | | EST EMBL:M89111 comes from this gene; cDNA EST EMBL:D27709 comes from |
| | | this gene; cDNA EST EMBL:D27708 comes from this gene; cDNA EST |
| | | EMBL:D73788 comes from this gene; cDNA EST yk3 . . . Length = 556 |
| 773 | 2023773 | 1E-107 >gb\|AAC34243.1\| (AC004411) pto kinase [Arabidopsis thaliana] |
| | | Length = 365 |
| 774 | 2023774 | 9E-88 >gi\|3075394 (AC004484) beta-ketoacyl-CoA synthase |
| | | [Arabidopsis thaliana] >gi\|3559809\|emb\|CAA09311\| (AJ010713) fiddlehead protein |
| | | [Arabidopsis thaliana] Length = 550 |
| 775 | 2023775 | Tyr_Phospho_Site(428-434) |
| 776 | 2023776 | 1E-125 >emb\|CAB45880.1\| (AL080282) protein [Arabidopsis thaliana] |
| | | Length = 1396 |
| 777 | 2023777 | 5E-73 >sp\|P52810\|RS9_PODAN 40S RIBOSOMAL PROTEIN 59 (37) |
| | | >gi\|1321917\|emb\|CAA65433\| (X96613) cytoplasmic ribosomal protein S7 |
| | | [Podospora anserina] Length = 190 |
| 778 | 2023778 | 1E-138 >gi\|1066499 (L37606) NADH-dependent glutamate synthase |
| | | [Medicago sativa] Length = 2194 |
| 779 | 2023779 | 4E-37 >gb\|AAD19788\| (AC006528) zinc-finger protein, 5′ partial |
| | | [Arabidopsis thaliana] Length = 626 |
| 780 | 2023780 | 1E-10 >gi\|3600032 (AF080119) contains similarity to tropomyosin |
| | | (Pfam: Tropomyosin.hmm, score: 14.57) and ATP synthase (Pfam: ATP- |
| | | synt B.hmm, score: 10.89) [Arabidopsis thaliana] Length = 466 |
| 781 | 2023781 | 9E-86 >gi\|2924779 (AC002334) 3-ketoacyl-CoA thiolase [Arabidopsis |
| | | thaliana] >gi\|2981616\|dbj\|BAA25248\| (AB008854) 3-ketoacyl-CoA thiolase |
| | | [Arabidopsis thaliana] >gi\|2981618\|dbi\|BAA25249\| (AB008855) 3-ketoacyl |
| 782 | 2023782 | 2E-91 >emb\|CAB16762.1\| (Z99707) caltractin-like protein [Arabidopsis |
| | | thaliana] Length = 167 |
| 783 | 2023783 | 3E-50 >gb\|AAD21025\| (AF106939) 1,4-benzoquinone reductase |
| | | [Phanerochaete chrysosporium] Length = 201 |
| 784 | 2023784 | Tyr_Phospho_Site(1296-1304) |
| 785 | 2023785 | Tyr_Phospho_Site(290-296) |
| 786 | 2023786 | 2E-52 >gb\|AAD22344.1\|AC006592_1 (AC006592) anthocyanidin-3-glucoside |
| | | rhamnosyltransferase, 3′ partial [Arabidopsis thaliana] Length = 414 |
| 787 | 2023787 | Tyr_Phospho_Site(49-56) |
| 788 | 2023788 | 1E-70 ) >emb\|CAB41005.1\| (AL049640) blue copper-binding protein, 15K |
| | | (lamin) [Arabidopsis thaliana] Length = 141 |
| 789 | 2023789 | 8E-25 >sp\|P73689\|SPPA_SYNY3 PROTEASE IV HOMOLOG |
| | | (ENDOPEPTIDASE IV) >gi\|1652816\|dbj\|BAA177351 (090908) protease IV |
| | | [Synechocystis sp.] Length = 610 |
| 790 | 2023790 | 1E-120 >sp\|Q42599\|NUIM_ARATH NADH-UBIQUINONE |
| | | OXIDOREDUCTASE 23 KD SUBUNIT PRECURSOR (COMPLEX 1-23KD) (Cl- |
| | | 23KD) >9111076356\|pir\|S52380 NADH dehydrogenase (EC 1.6.99.3)- Arabidopsis |
| | | thaliana >gi\|666977\|emb\|CAA59061\| (X84318) NADH dehydrogenase |
| | | [Arabidopsis thaliana] >gi\|3152573 |
| 791 | 2023791 | 4E-91 >gb\|AAD44761.1\|AF144752_1 (AF144752) 40S ribosomal protein S7 |
| | | homolog [Brassica oleracea] Length = 191 |
| 792 | 2023792 | 1E-121 ) >pir\|\|S36884 ketol-acid reductoisomerase (EC 1.1.1.86) - |
| | | Arabidopsis thaliana >gi\|402552\|emb\|CAA495O6\| (X69880) ketol-acid |
| | | reductoisomerase [Arabidopsis thaliana] Length = 591 |
| 793 | 2023793 | Pkc_Phospho_Site(29-31) |
| 794 | 2023794 | 8E-53 >gi\|4220474 (AC006069) myosin heavy chain [Arabidopsis |
| | | thaliana] Length = 629 |
| 795 | 2023795 | 1E-140 >sp\|O64637\|C7C2_ARATH CYTOCHROME P450 76C2 >gi\|2979549 |
| | | (AC003680) 7-ethoxycoumarin O-deethylase [Arabidopsis thaliana] Length = 512 |
| 796 | 2023796 | 1E-77 >emb\|CAA96435\| (Z71753) pectin methylesterase [Nicotiana |
| | | plumbaginifolia] Length = 315 |
| 797 | 2023797 | 4E-79 >emb\|CAB41928.1\| (AL049751) short-chain alcohol dehydrogenase |
| | | like protein [Arabidopsis thaliana] Length = 263 |
| 798 | 2023798 | 3E-27 >ref\|NP006818.1\|PTMP21\| transmembrane trafficking protein |
| | | >gi\|3915893\|sp\|P49755\|TM21_HUMAN TRANSMEMBRANE PROTEIN TMP21 |
| | | PRECURSOR (S31III125) (S31I125) >gi\|1359886\|emb\|CAA66071\| (X97442) |
| | | transmembrane protein [Homo sapiens] >gi\|1407826 (U61734) protein trafficking |
| | | protein [Homo sapiens] >gi\|3288463\|emb\|CAA0621 3.1\| (AJ004913) integral |
| | | membrane protein, Tmp21-I (p23) [Homo sapiens] |
| | | >gi\|4885697\|gb\|AA031941.1\| AC0070556 (AC007055) TM P21 [Homo sapiens] |
| | | Length = 219 |
| 799 | 2023799 | Tyr_Phospho_Site(250-257) |
| 800 | 2023800 | 8E-19 >gi\|3193325 (AF069299) contains similarity to pectinesterases |
| | | [Arabidopsis thaliana] Length = 209 |
| 801 | 2023801 | Tyr_Phospho_Site(236-242) |
| 802 | 2023802 | 1E-147 >emb\|CAB41122.1\| (AL049657) proteasome regulatory subunit |
| | | [Arabidopsis thaliana] Length = 406 |
| 803 | 2023803 | 2E-49 >emb\|CAB00039.1\| (Z75712) Similarity to S. Pombe BEM1/BUD5 |
| | | suppressor; cDNA EST EMBL:Z14470 comes from this gene; cDNA EST |
| | | yk482d4.3 comes from this gene; cDNA EST yk482d4.5 comes from this gene |
| | | [Caenorhabditis elegans] Length = 405 |
| 804 | 2023804 | 3E-77 >emb\|CAB38828.1\| (AL035679) proton pump [Arabidopsis thaliana] |
| | | Length = 843 |
| 805 | 2023805 | Pkc_Phospho_Site(74-76) |
| 806 | 2023806 | Pkc_Phospho_Site(147-149) |
| 807 | 2023807 | 2E-97 >sp\|P49177\|GBB_ARATH GUANINE NUCLEOTIDE-BINDING |
| | | PROTEIN BETA SUBUNIT >gi\|557694 (U12232) GTP binding protein beta |
| | | subunit [Arabidopsis thaliana] >gi\|3096915\|emb\|CAA18825.1\| (AL023094) GTP |
| | | binding protein beta subunit [A |
| 808 | 2023808 | 2E-79 >dbj\|BAA13947\| (D89341) luminal binding protein [Arabidopsis |
| | | thaliana Length = 669 |
| 809 | 2023809 | 5E-79 >emb\|CAA73063.1\| (Y12459) cytosolic glutamine synthetase |
| | | Brassica napus Length = 356 |
| 810 | 2023810 | 1E-82 >sp\|P29525\|OLEO_ARATH OLEOSIN >gi\|282875\|pir\|\|S22538 oleosin |
| | | - Arabidopsis thaliana >gi\|164O5\|emb\|CAA44225\| (X62353) oleosin [Arabidopsis |
| | | thaliana] >gi\|4455257\|emb\|CAB36756.1\| (AL035523) oleosin, 18.5K [Arabidopsis |
| | | thali |
| 811 | 2023811 | 1E-108 >gi\|4056502 (AC005896) 40S ribosomal protein S5 [Arabidopsis |
| | | thaliana] Length = 207 |
| 812 | 2023812 | 1E-123 >gi\|3319357 (AF077407) contains similarity to |
| | | phosphoenolpyruvate synthase (ppsA) (GB:AE001056) [Arabidopsis thaliana] |
| | | Length = 662 |
| 813 | 2023813 | 7E-55 >emb\|CAB06417\| (Z84377) xylosidase [Aspergillus niger] Length = |
| | | 804 |
| 814 | 2023814 | 3E-11 >gi\|3548810 (AC005313) chloroplast nucleoid DNA binding |
| | | protein [Arabidopsis thaliana] Length = 461 |
| 815 | 2023815 | 3E-33 >gi\|3402683 (AC004697) patatin-like protein [Arabidopsis |
| | | thaliana] Length = 499 |
| 816 | 2023816 | 6E-92 >sp\|P49209\|RL9_ARATH 60S RIBOSOMAL PROTEIN L9 |
| | | >gi\|2129720\|pir\|\|S71255 ribosomal protein L9- Arabidopsis thaliana |
| | | >gi\|1107489\|emb\|CAA63024\| (X91958) 605 ribosomal protein L9 [Arabidopsis |
| | | thaliana] Length = 195 |
| 817 | 2023817 | 1E-10 >emb\|CAB38212\| (AL035601) protein [Arabidopsis thaliana] |
| | | Length 252 |
| 818 | 2023818 | 1E-130 >gi\|2618688 (AC002510) esterase D [Arabidopsis thaliana] |
| | | Length = 284 |
| 819 | 2023819 | 1E-171 >sp\|P46644\|AAT3_ARATH ASPARTATE AMINOTRANSFERASE, |
| | | CHLOROPLAST PRECURSOR (TRANSAMINASE A) >gi\|693692 (U15034) |
| | | aspartate aminotransferase [Arabidopsis thaliana] Length = 449 |
| 820 | 2023820 | 1E-17 >dbj\|BAA33206\| (AB001888) zinc finger protein [Oryza sativa] |
| | | Length = 407 |
| 821 | 2023821 | Tyr_Phospho_Site(160-167) |
| 822 | 2023822 | 1E-122 ) >gi\|2388578 (AC000098) Similar to Mycobacterium RIpF |
| | | (gb\|Z84395). ESTs gb\|T75785, gb\|R30580, gb\|T04698 come from this gene. |
| | | [Arabidopsis thaliana] Length = 223 |
| 823 | 2023823 | 1E-129 >gb\|AAD25665.1\|AC007020_7 (AC007020) ferritin protein [Arabidopsis |
| | | thaliana] >gi\|4588004\|gb\|AAD25945.1\|AF085279_18 (AF085279) hypothetical |
| | | ferritin subunit [Arabidopsis thaliana] Length = 259 |
| 824 | 2023824 | Zinc_Finger_C2h2(360-382) |
| 825 | 2023825 | 2E-91 >gi\|3688799 (AF057137) gamma tonoplast intrinsic protein 2 |
| | | [Arabidopsis thaliana] Length = 253 |
| 826 | 2023826 | Tyr_Phospho_Site(60-67) |
| 827 | 2023827 | 6E-68 >sp\|P32110\|GTX6_SOYBN PROBABLE GLUTATHIONE S- |
| | | TRANSFERASE (HEAT SHOCK PROTEIN 26A) (G2-4) >gi\|99912\|pir\|\|A33654 |
| | | heat shock protein 26A - soybean >gi\|169981 (M20363) Gmhsp26-A [Glycine |
| | | max] Length = 225 |
| 828 | 2023828 | 1E-101 >gb\|AAD39666A\|AC007591_31 (AC007591) Is a member of the |
| | | PF\|00903 gyloxalase family. ESTs gb\|T44721, gb\|T21844 and gb\|AA395404 come |
| | | from this gene. [Arabidopsis thaliana] Length = 174 |
| 829 | 2023829 | Rgd(1357-1359) |
| 830 | 2023830 | 5E-90 ) >gb\|AAD30232.1\|AC007202_14 (AC007202) Is a member of the |
| | | PF\|00171 aldehyde dehydrogenase family. ESTs gb\|T21534, gb\|N65241 and |
| | | gb\|AA395614 come from this gene. [Arabidopsis thaliana] Length = 509 |
| 831 | 2023831 | 2E-20 >sp\|Q46O36\|BLC_CITFR OUTER MEMBRANE LIPOPROTEIN BLC |
| | | PRECURSOR >gi\|2121019\|pir\|\|40710 outer membrane lipoprotein - Citrobacter |
| | | freundii >gi\|717136 (U21727) lipocalin precursor [Citrobacter freundii] Length = |
| | | 177 |
| 832 | 2023832 | 2E-89 >sp\|P30707\|RL9_PEA 60S RIBOSOMAL PROTEIN L9 |
| | | (GIBBERELLIN-REGULATED PROTEIN GA) >gi\|100065\|pir\|\|S19978 ribosomal |
| | | protein L9 - garden pea >gi\|20727\|emb\|CAA46273\| (X65155) GA [Pisum sativum] |
| | | Length = 193 |
| 833 | 2023833 | Tyr_Phospho_Site(896-903) |
| 834 | 2023834 | 2E-87 >sp\|P42748\|UBC4_ARATH UBIQUITIN-CONJUGATING ENZYME E2- |
| | | 21 KD 1 (UBIQUITIN-PROTEIN LIGASE 4) (UBIQUITIN CARRIER PROTEIN 4) |
| | | >gi\|431266 (L19354) ubiquitin conjugating enzyme [Arabidopsis thaliana] Length |
| | | = 187 |
| 835 | 2023835 | 9E-83 >gi\|1256424 (U51119) cysteine proteinase inhibitor [Brassica |
| | | campestris] Length = 205 |
| 836 | 2023836 | 1E-119 >gb\|AAD50015.1\|AC007651_10 (AC007651) glutathione transferase |
| | | [Arabidopsis thaliana] Length = 221 |
| 837 | 2023837 | Zinc_Finger_C2h2(1242-1265) |
| 838 | 2023838 | Tyr_Phospho_Site(88-96) |
| 839 | 2023839 | Pkc_Phospho_Site(31-33) |
| 840 | 2023840 | 1E-180 >gi\|3355490 (AC004218) dolichyl-phosphate beta- |
| | | glucosyltransferase [Arabidopsis thaliana] Length 336 |
| 841 | 2023841 | 1E-101 >gi\|682728 (L40031) S-adenosyl-L-methionine:trans-caffeoyl- |
| | | Coenzyme A 3-O-methyltransferase [Arabidopsis thaliana] Length = 212 |
| 842 | 2023842 | 3E-14 >gi\|3293547 (AF072709) oxidoreductase [Streptomyces lividans] |
| | | Length = 313 |
| 843 | 2023843 | 5E-25 >dbj\|BAA82843.1\| (AB023651) miraculin homologue [Solanum |
| | | melongena] Length = 160 |
| 844 | 2023844 | 1E-110 >sp\|P54888\|PSC2_ARATH DELTA 1-PYRROLINE-5-CARBOXYLATE |
| | | SYNTHETASE B (P5CS B) [INCLUDES: GLUTAMATE 5-KINASE (GAMMA- |
| | | GLUTAMYL KINASE) (GK); GAMMA-GLUTAMYL PHOSPHATE REDUCTASE |
| | | (GPR) (GLUTAMATE-5-SEMIALDEHYDE DEHYDROGENASE) (GLUTAMYL- |
| | | GAMMA-SEMIALDE . . . >gi\|887388\|emb\|CAA60447\| (X86778) pyrroline-5- |
| | | carboxylate synthetase B [Arabidopsis thaliana] >gi\|1669658\|emb\|CAA70527\| |
| | | (Y09355) pyrroline-5-carboxlyate synthetase [Arabidopsis thaliana] Length = 726 |
| 845 | 2023845 | 1E-138 >gi\|1020155 (U26936) DNA-binding protein [Arabidopsis |
| | | thaliana] Length = 236 |
| 846 | 2023846 | 4E-76 >emb\|CAB38956.1\| (AL049171) pyrophosphate-dependent |
| | | phosphofructo-1-kinase [Arabidopsis thaliana] Length = 500 |
| 847 | 2023847 | 1E-155 >gi\|4185136 (AC005724) trehalose-6-phosphate synthase |
| | | [Arabidopsis thaliana] Length = 862 |
| 848 | 2023848 | 1E-30 >gi\|2642215 (AF030386) NOI protein [Arabidopsis thaliana] |
| | | Length = 79 |
| 849 | 2023849 | 2E-59 >gi\|2739044 (AF024651) polyphosphoinositide binding protein |
| | | Ssh1p [Glycine max] Length = 324 |
| 850 | 2023850 | 2E-59 >sp\|P40602\|APG_ARATH ANTER-SPECIFIC PROLINE-RICH |
| | | PROTEIN APG PRECURSOR >gi\|99694\|pir\|\|521961 proline-rich protein APG - |
| | | Arabidopsis thaliana >gi\|22599\|emb\|CAA42925\| (X60377) APG [Arabidopsis |
| | | thaliana] Length = 534 |
| 851 | 2023851 | Pkc_Phospho_Site(5-7) |
| 852 | 2023852 | 1E-104 >gi\|3395434 (AC004683) peroxidase [Arabidopsis thaliana] |
| | | >gi\|742248\|prf\|\|2009327B peroxidase [Arabidopsis thaliana] Length = 349 |
| 853 | 2023853 | Tyr_Phospho_Site(1115-1122) |
| 854 | 2023854 | 6E-40 >dbj\|BAA76393.1\| (AB025187) cytochrome c oxidase subunit 6b-1 |
| | | [Oryza sativa] Length = 169 |
| 855 | 2023855 | Tyr_Phospho_Site(426-433) |
| 856 | 20238566E | 6E-43 >pir\|\|S52995 arabinogalactan-like protein - loblolly pine >gi\|607774 |
| | | (U09556) arabinogalactan-like protein [Pinus taeda] Length = 264 |
| 857 | 2023857 | 3E-91 >sp\|P47997\|G11A_ORYSA PROTEIN KINASE G11A |
| | | >gi\|100705\|pir\|\|B30311 protein kinase C (EC 2.7.1.-) homolog - rice (fragment) |
| | | >gi\|169788 (J04556) G11A protein [Oryza sativa] Length = 531 |
| 858 | 2023858 | 3E-93 ) >gi\|3927825 (AC005727) dTDP-glucose 4-6-dehydratase |
| | | [Arabidopsis thaliana] Length = 343 |
| 859 | 2023859 | 1E-101 >gb\|AAD41971.1\|AC006438_3 (AC006438) cold acclimation protein |
| | | WCOR413 [Triticum aestivum] [Arabidopsis thaliana] Length = 197 |
| 860 | 2023860 | 1E-137 >emb\|CAB37533\| (AL035538) glycine hydroxymethyltransferase |
| | | like protein [Arabidopsis thaliana] Length = 517 |
| 861 | 2023861 | 1E-112 ) >gi\|4056502 (AC005896) 405 ribosomal protein S5 |
| | | [Arabidopsis thaliana] Length = 207 |
| 862 | 2023862 | 6E-98 >gi\|4204274 (AC004146) ribulose bisphosphate carboxylase, |
| | | small subunit [Arabidopsis thaliana] Length = 180 |
| 863 | 2023863 | 4E-76 >pir\|\|S71286 oleosin isoform- Arabidopsis thaliana |
| | | >gi\|987014\|emb\|0AA90877\| (Z54164) oleosin [Arabidopsis thaliana] |
| | | >gi\|987016\|emb\|CAA90878\| (Z54165) oleosin [Arabidopsis thaliana] Length = 191 |
| 864 | 2023864 | Pkc_Phospho_Site(42-44) |
| 865 | 2023865 | Tyr_Phospho_Site(974-982) |
| 866 | 2023866 | Tyr_Phospho_Site(355-362) |
| 867 | 2023867 | 6E-35 >dbj\|BAA18248\| (D90912) ferredoxin [Synechocystis sp.] Length = |
| | | 122 |
| 868 | 2023868 | Tyr_Phospho_Site(109-117) |
| 869 | 2023869 | Tyr_Phospho_Site(638-645) |
| 870 | 2023870 | 5E-30 >emb\|CAB55502.1\| (AJ131768) tyramine |
| | | hydroxycinnamoyltransferase [Nicotiana tabacum] Length = 226 |
| 871 | 2023871 | 1E-131 >emb\|CAB45850.1\| (AL080254) reticuline oxidase-like protein |
| | | [Arabidopsis thaliana] Length = 539 |
| 872 | 2023872 | 9E-99 ) >emb\|CAB41123.1\| (AL049657) argininosuccinate synthase-like |
| | | protein [Arabidopsis thaliana] Length = 498 |
| 873 | 2023873 | Tyr_Phospho_Site(1364-1370) |
| 874 | 2023874 | 1E-108 >gb\|AAD32833.1\|AC00765915 (AC007659) mitochondrial elongation |
| | | factor G [Arabidopsis thaliana] Length = 754 |
| 875 | 2023875 | 1E-66 >emb\|CAA65533\| (X96758) clathrin coat assembly protein AP17 |
| | | [Zea mays] Length = 132 |
| 876 | 2023876 | 3E-92 >sp\|Q43117\|KPYA_RICCO PYRUVATE KINASE ISOZYME A, |
| | | CHLOROPLAST PRECURSOR >gi\|169703 (M64736) ATP:pyruvate |
| | | phosphotransferase [Ricinus communis] Length = 583 |
| 877 | 2023877 | 4E-83 >emb\|CAB10235.1\| (Z97336) auxin-responsive protein IAA1 |
| | | [Arabidopsis thaliana] Length = 168 |
| 878 | 2023878 | 2E-33 >gi\|3822225 (AF079183) RING-H2 finger protein RHG1a |
| | | [Arabidopsis thaliana] Length = 190 |
| 879 | 2023879 | 1E-24 >gb\|AAD38289.1\|AC00778915 (AC007789) ABA induced plasma |
| | | membrane protein [Oryza sativa] Length = 189 |
| 880 | 2023880 | 1E-105 >sp\|P10797\|RBS3_ARATH RIBULOSE BISPHOSPHATE |
| | | CARBOXYLASE SMALL CHAIN 2B PRECURSOR (RUBISCO SMALL SUBUNIT |
| | | 2B) >gi\|68061\|pir\|\|RKMUB2 ribulose-bisphosphate carboxylase (EC 4.1.1.39) |
| | | small chain B2 precursor- Arabidopsis thaliana >gi\|16194\|emb\|CAA32701\| |
| | | (X14564) ribulose bisphosphate carboxylase [Arabidopsis thaliana] Length = 181 |
| 881 | 2023881 | 1E-139 >gi\|3402678 (AC004697) adenylate kinase [Arabidopsis |
| | | thaliana] Length = 295 |
| 882 | 2023882 | Tyr_Phospho_Site(98-106) |
| 883 | 2023883 | 5E-26 >gb\|AAD34267.1\|AF084419\| (AF084419) calmodulin mutant |
| | | SYNCAM64A [synthetic construct] Length = 147 |
| 884 | 2023884 | 2E-15 >bbs\|4807313 kDa-B polypeptide of iron-sulfur protein fraction |
| | | of NADH:ubiquinone oxidoreductase [cattle, heart, Peptide Mitochondrial Partial, |
| | | 114 aa] Length = 114 |
| 885 | 2023885 | Tyr_Phospho_Site(937-944) |
| 886 | 2023886 | 4E-73 >gb\|AAD39281.1\|A00075764 (AC007576) initiation factor 5A-4 |
| | | [Arabidopsis thaliana] Length = 158 |
| 887 | 2023887 | Pkc_Phospho_Site(69-71) |
| 888 | 2023888 | Tyr_Phospho_Site(100-106) |
| 889 | 2023889 | 6E-74 >emb\|CAB38706.1\| (AJ131464) nitrate transporter [Arabidopsis |
| | | thaliana] Length = 567 |
| 890 | 2023890 | Tyr_Phospho_Site(1268-1275) |
| 891 | 2023891 | Zinc_Finger_C2h2(755-775) |
| 892 | 2023892 | 7E-81 >dbj\|BAA24074\| (D89824) GTP-binding protein [Arabidopsis |
| | | thaliana] Length 210 |
| 893 | 2023893 | 2E-33 >gi\|4164539 (AF079170) phloem protein [Cucurbita maxima] |
| | | Length = 150 |
| 894 | 2023894 | 4E-15 >gi\|2739366 (AC002505) SF16 like protein [Arabidopsis thaliana] |
| | | Length = 516 |
| 895 | 2023895 | Phospho Site(1301-1307) |
| 896 | 2023896 | 1E-57 >emb\|CAA74052\| (Y13724) Transcription factor [Arabidopsis |
| | | thaliana] Length = 187 |
| 897 | 2023897 | Tyr_Phospho_Site(768-775) |
| 898 | 2023898 | 5E-38 >gi\|3599491 (AF085149) aminotransferase [Capsicum chinense] |
| | | Length = 459 |
| 899 | 2023899 | Rgd(210-212) |
| 900 | 2023900 | Tyr_Phospho_Site(1201-1208) |
| 901 | 2023901 | 1E-144 >pir\|\|S51697 oleoyl-[acyl-carner-protein] hydrolase (EC 3.1.2.14) |
| | | - Arabidopsis thaliana >gi\|2129530\|pir\|\|569195 acyl-(acyl carrier protein) |
| | | thioesterase (clone TE 1-1)- Arabidopsis thaliana >gi\|634003\|emb\|CAA85387\| |
| | | (Z36910) acyl-(acyl carrier protein) thioesterase [Arabidopsis thaliana] Length = |
| | | 412 |
| 902 | 2023902 | 5E-79 >gi\|2281629 (AF003095) AP2 domain containing protein RAP2.2 |
| | | [Arabidopsis thaliana] Length 246 |
| 903 | 2023903 | 5E-91 >sp\|Q39836\|GBLP_SOYBN GUANINE NUCLEOTIDE-BINDING |
| | | PROTEIN BETA SUBUNIT-LIKE PROTEIN >gi\|1256608\|gb\|AAB05941.1\| |
| | | (U44850) G beta-like protein [Glycine max] Length = 325 |
| 904 | 2023904 | 7E-87 >gi\|1872544 (U89014) early light-induced protein; ELIP |
| | | [Arabidopsis thaliana] Length = 195 |
| 905 | 2023905 | 1E-108 >gi\|507164 (U04818) PITSLRE alpha 2-4 [Homo sapiens] |
| | | Length = 562 |
| 906 | 2023906 | 1E-121 >gi\|3421082 (AF043523) 20S proteasome subunit PAD2 |
| | | [Arabidopsis thaliana] Length 250 |
| 907 | 2023907 | 6E-69 >sp\|P55964\|KPYG_RICCO PYRUVATE KINASE ISOZYME G, |
| | | CHLOROPLAST Length = 418 |
| 908 | 2023908 | 1E-108 >gi\|3033400 (AC004238) Ser/Thr protein kinase [Arabidopsis |
| | | thaliana] Length = 1257 |
| 909 | 2023909 | 1E-127 >gb\|AAD31337.1\|AC007354_10 (AC007354) Strong similarity to |
| | | gb\|Y09533 involved in starch metabolism from Solanum tuberosum and contains |
| | | a PF\|01326 Pyruvate phosphate dikinase, PEP/pyruvate binding domain. EST |
| | | gb\|N96757 comes from this gene. [. . . Length = 1358 |
| 910 | 2023910 | Tyr_Phospho_Site(1347-1355) |
| 911 | 2023911 | Tyr_Phospho_Site(1324-1331) |
| 912 | 2023912 | Rgd(731-733) |
| 913 | 2023913 | 5E-31 >gb\|AAD20708\| (AC006300) glucose-induced repressor protein |
| | | [Arabidopsis thaliana] Length = 628 |
| 914 | 2023914 | Tyr_Phospho_Site(4-11) |
| 915 | 2023915 | 3E-30 >emb\|CAB38807.1\| (AL035678) nucellin-like protein [Arabidopsis |
| | | thaliana] Length = 420 |
| 916 | 2023916 | 3E-50 >dbj\|BAA22813\| (D26015) CND41, chloroplast nucleold DNA |
| | | binding protein [Nicotiana tabacum] Length = 502 |
| 917 | 2023917 | 5E-67 >gi\|2281633 (AF003097) AP2 domain containing protein RAP2.4 |
| | | [Arabidopsis thaliana] Length = 229 |
| 918 | 2023918 | 2E-98 RBS4 _ARATH RIBULOSE BISPHOSPHATE CARBOXYLASE SMALL |
| | | CHAIN SUBUNIT |
| 919 | 2023919 | Sugar_Transport_2(364-389) |
| 920 | 2023920 | Tyr_Phospho_Site(218-225) |
| 921 | 2023921 | 3E-41 >emb\|CAB51834.1\| (AJ243961) contains eukaryotic protein kinase |
| | | domain PF100069 [Oryza sativa] Length = 844 |
| 922 | 2023922 | 4E-28 >9b\|AAD28599.1\|AF1267429 (AF126742) bundle sheath defective protein |
| | | 2 [Zea mays] Length = 129 |
| 923 | 2023923 | 2E-75 ) >gi\|1408473 (U48939) actin depolymerizing factor 2 |
| | | [Arabidopsis thaliana] Length = 137 |
| 924 | 2023924 | 1E-91 >dbj\|BAA20084.1\| (AB003590) sulfate transporter [Arabidopsis |
| | | thaliana] >gi\|2114106\|dbj\|BAA20085.1\| (AB003591) sulfate transporter |
| | | [Arabidopsis thaliana] Length 677 |
| 925 | 2023925 | 5E-88 >gi\|2317912 (U89959) cathepsin B-like cysteine proteinase |
| | | [Arabidopsis thaliana] Length = 357 |
| 926 | 2023926 | Tyr_Phospho_Site(591-597) |
| 927 | 2023927 | 1E-110 ) >emb\|CAA16940.1\| (AL021768) small GTP-binding protein-like |
| | | [Arabidopsis thaliana] Length = 200 |
| 928 | 2023928 | 1E-112 >gb\|AAD28774.1\|AF134127_1 (AF134127) Lhcb4.2 protein [Arabidopsis |
| | | thaliana] Length = 287 |
| 929 | 2023929 | 4E-54 >emb\|CAB56149.1\| (AJ242970) BTF3b-like factor [Arabidopsis |
| | | thaliana] Length 165 |
| 930 | 2023930 | 5E-21 >gb\|AAD46412.1\|AF096262_\| (AF096262) ER6 protein [Lycopersicon |
| | | esculentum] Length = 168 |
| 931 | 2023931 | 1E-105 >sp\|P10797\|RBS3_ARATH RIBULOSE BISPHOSPHATE |
| | | CARBOXYLASE SMALL CHAIN 2B PRECURSOR (RUBISCO SMALL SUBUNIT |
| | | 2B) >gi\|68061\|pir\|\|RKMUB2 ribulose-bisphosphate carboxylase (EC 4.1.1.39) |
| | | small chain B2 precursor- Arabidopsis thaliana >gi\|16194\|emb\|CAA32701\| |
| | | (X14564) ribulose bisphosphate carboxylase [Arabidopsis thaliana] Length = 181 |
| 932 | 2023932 | Tyr_Phospho_Site(1153-1159) |
| 933 | 2023933 | 2E-82 >gi\|3834310 (AC005679) Similar to Ubiquitin-conjugating enzyme |
| | | E2-17 KD gb\|D83004 from Homo sapiens. ESTs gb\|T88233, gb\|Z24464, |
| | | gb\|N37265, gb\|H36151, gb\|Z34711, gb\|AA040983, and gb\|T22122 come from this |
| | | gene. [Arabidopsis thaliana] Length = 163 |
| 934 | 2023934 | 1E-104 >gb\|AAB51571.1\| (U75193) germin-like protein [Arabidopsis |
| | | thaliana] >gi\|1755168\|gb\|AAB5\| 573.1\| (U75195) germin-like protein [Arabidopsis |
| | | thaliana] >gi\|2239042\|emb\|CAA73213\|(Y12673) GLP3 protein [Arabidopsis thalia |
| 935 | 2023935 | Tyr_Phospho_Site(1372-1379) |
| 936 | 2023936 | 1E-106 >emb\|CAB41927.1\| (AL049751) ribosomal protein L13a like protein |
| | | [Arabidopsis thaliana] Length = 206 |
| 937 | 2023937 | Pkc_Phospho_Site(51-53) |
| 938 | 2023938 | 3E-79 >sp\|065788\|C7B2_ARATH CYTOCHROME P450 71B2 |
| | | >gi\|3164140\|dbj\|BAA285371 (D78605) cytochrome P450 monooxygenase |
| | | [Arabidopsis thaliana] Length = 502 |
| 939 | 2023939 | Tyr_Phospho_Site(11-18) |
| 940 | 2023940 | Tyr_Phospho_Site(13-20) |
| 941 | 2023941 | 6E-57 >pir\|\|552578 protein-serine/threonine kinase NPK15 - common |
| | | tobacco >gi\|505146\|dbj\|BAA06538\| (031737) protein-serine/threonine kinase |
| | | [Nicotiana tabacum] Length = 422 |
| 942 | 2023942 | 8E-94 ) >gi\|3337356 (AC004481) protein transport protein SEC61 |
| | | alpha subunit [Arabidopsis thaliana] Length = 475 |
| 943 | 2023943 | 4E-38 >gi\|2459440 (AC002332) receptor kinase [Arabidopsis thaliana] |
| | | Length = 664 |
| 944 | 2023944 | 6E-14 >sp\|P80728\|MAVI_CUCPE MAVICYANIN >gi\|1836088\|bbs\|\|79249 |
| | | mavicyanin = 12.752 kda small blue copper-containing stellacyanin-like |
| | | glycoprotein/type I cupredoxin [Cucurbita pepo = green zucchini, peelings, Peptide, |
| | | 108 aa] Length = 108 |
| 945 | 2023945 | SE-60 >gb\|AAD34695.1\|AC006341_23 (AC006341) Similar to gb\|AJ224359 |
| | | surfeit locus protein 5 (surf5b) from Homo sapiens. [Arabidopsis thaliana] Length |
| | | = 150 |
| 946 | 2023946 | Tyr_Phospho_Site(257-264) |
| 947 | 2023947 | 1E-78 ) >emb\|CAB10195.1\| (Z97335) transport protein [Arabidopsis |
| | | thaliana] Length 769 |
| 948 | 2023948 | 1E-39 >gi\|3386612 (AC004665) DNA-binding protein, dbp [Arabidopsis |
| | | thaliana] Length = 190 |
| 949 | 2023949 | Pkc_Phospho_Site(12-14) |
| 950 | 2023950 | Tyr_Phospho_Site(574-580) |
| 951 | 2023951 | 1E-55 >pir\|\|S37101 ATAF1 protein- Arabidopsis thaliana (fragment) |
| | | >gi\|1345506\|emb\|CAA52771\| (X74755) ATAF1 [Arabidopsis thaliana] Length = |
| | | 229 |
| 952 | 2023952 | Pkc_Phospho_Site(45-47) |
| 953 | 2023953 | 1E-125 >emb\|CAB38921.1\| (AL035709) bZIP transcription factor-like |
| | | protein [Arabidopsis thaliana] Length = 305 |
| 954 | 2023954 | 1E-93 >emb\|CAA72792\| (Y12071) thylakoid lumen rotamase [Spinacia |
| | | oleracea] Length = 449 |
| 955 | 2023955 | 7E-64 ) >gi\|2708746 (AC003952) DnaJ-like chaperonin [Arabidopsis |
| | | thaliana] Length = 160 |
| 956 | 2023956 | 9E-95 >pir\|\|533612 isocitrate dehydrogenase - soybean Length = 451 |
| 957 | 2023957 | 1E-106 >sp\|O23515\|RL15_ARATH 605 RIBOSOMAL PROTEIN L15 |
| | | >gi\|2245027\|emb\|CAB10447.1\| (Z97341) ribosomal protein [Arabidopsis thaliana] |
| | | Length = 204 |
| 958 | 2023958 | 1E-63 >gb\|AAC28488.1\| (AF079588) 1-aminocyclopropane-1-carboxylate |
| | | oxidase [Sorghum bicolor] Length = 316 |
| 959 | 2023959 | 3E-58 >emb\|CAB36546.1\| (AL035440) DNA binding protein [Arabidopsis |
| | | thaliana] Length = 427 |
| 960 | 2023960 | Tyr_Phospho_Site(190-196) |
| 961 | 2023961 | Tyr_Phospho_Site(818-825) |
| 962 | 2023962 | 1E-131 >gi\|2511725 (AF021937) catalase 1 [Arabidopsis thaliana] |
| | | Length = 492 |
| 963 | 2023963 | 1E-19 >gi\|1905887 (U92461) recombination factor GdRad54 [Gallus |
| | | gallus] Length = 733 |
| 964 | 2023964 | 1E-103 >sp\|P46283\|517P_ARATH SEDOHEPTULOSE-1,7- |
| | | BISPHOSPHATASE, CHLOROPLAST PRECURSOR (SEDOHEPTULOSE- |
| | | BISPHOSPHATASE) (SBPASE) (SED(1,7)P2ASE) >gi\|1076403\|pir\|\|551838 |
| | | sedoheptulose-1,7-biphosphatase-Arabidopsis thaliana >gi\|786 |
| 965 | 2023965 | 2E-17 >emb\|CAA99819.1\| (Z75533) waek similarty with bacillus |
| | | amyloliquefaciens permease IIBO (Swiss Prot accession number P41029); cDNA |
| | | EST yk573h3.3 comes from this gene [Caenorhabditis elegans] Length = 378 |
| 966 | 2023966 | 8E-26 >pir\|\|549463 chloroplast RNA binding protein - kidney bean |
| | | >gi\|558629\|emb\|0AA57551\| (X82030) chloroplast RNA binding protein [Phaseolus |
| | | vulgaris] Length = 287 |
| 967 | 2023967 | 1E-44 >emb\|CAA55397\| (X78820) casein kinase I [Arabidopsis thaliana] |
| | | Length = 364 |
| 968 | 2023968 | 1E-105 ) >gb\|AAB51565.1\| (U75187) germin-like protein [Arabidopsis |
| | | thaliana] Length = 204 |
| 969 | 2023969 | 2E-96 >emb\|CAA65502\| (X96727) isocitrate dehydrogenase (NAD+) |
| | | [Nicotiana tabacum] Length = 364 |
| 970 | 2023970 | Pkc_Phospho_Site(26-28) |
| 971 | 2023971 | 4E-43 >gi\|871780 (L43080) pEARLI 1 gene product [Arabidopsis |
| | | thaliana] >gi\|4725947\|emb\|CAB41718.1\| (AL049730) pEARLI 1 [Arabidopsis |
| | | thaliana] Length = 168 |
| 972 | 2023972 | 2E-16 >sp\|P24805\|TSJT_TOBAC STEM-SPECIFIC PROTEIN TSJT1 |
| | | >gi\|00383\|pir\|\|513551 stem-specific protein - common tobacco |
| | | >gi\|20037\|emb\|CAA36525\| (X52283) stem specific, weakly expressed in other |
| | | organs (Nicotiana tabacum] Length = 149 |
| 973 | 2023973 | 1E-18 >gb\|AAD210411 (AF116237) pseudouridine synthase 1 [Mus |
| | | musculus] Length = 393 |
| 974 | 2023974 | Tyr_Phospho_Site(95-102) |
| 975 | 2023975 | 1E-108 ) >prf\|\|1804333B Gln synthetase [Arabidopsis thaliana] Length = |
| | | 430 |
| 976 | 2023976 | 1E-116 >gi\|2947070 (AC002521) Ser/Thr protein kinase [Arabidopsis |
| | | thaliana] Length = 429 |
| 977 | 2023977 | 3E-15 >sp\|P74523\|YE19_SYNY3 HYPOTHETICAL 17.7 KD PROTEIN |
| | | SLR1419 >gi\|1653717\|dbj\|BAA18628\| (D90916) hypothetical protein |
| | | [Synechocystis sp.] Length = 159 |
| 978 | 2023978 | 7E-20 >gi\|3033400 (AC004238) Ser/Thr protein kinase [Arabidopsis |
| | | thaliana] Length = 1257 |
| 979 | 2023979 | Tyr_Phospho_Site(28-35) |
| 980 | 2023980 | Pkc_Phospho_Site(16-18) |
| 981 | 2023981 | Rgd(231-233) |
| 982 | 2023982 | Pkc_Phospho_Site(16-18) |
| 983 | 2023983 | 3E-24 >gi\|2854070 (AF044914) histone deacetylase [Arabidopsis |
| | | thaliana] Length = 305 |
| 984 | 2023984 | 1E-28 >gi\|3157924 (AC002131) Contains homology to extensin-like |
| | | protein gb\|083227 from Populus nigra. ESTs gb\|H76425, gb\|T13883, gb\|T45348, |
| | | gb\|H37743, gb\|AA042634, gb\|Z26960 and gb\|Z25951 come from this gene. There |
| | | is a similar ORF on the opposite strand. [. . . >gi\|4063707 (AF104327) extensin-like |
| | | protein [Arabidopsis thaliana] Length = 137 |
| 985 | 2023985 | Receptor_Cytokines_1(1550-1562) |
| 986 | 2023986 | 1E-113 >gi\|3420055 (AC004680) cyclophilin [Arabidopsis thaliana] |
| | | Length = 201 |
| 987 | 2023987 | 2E-27 >emb\|CAB45075.1\| (AL078637) serine/threonine kinase-like protein |
| | | [Arabidopsis thaliana] Length = 445 |
| 988 | 2023988 | Zinc_Finger_C2h2(929-950) |
| 989 | 2023989 | 1E-141 >pir\|\|537495 peroxidase (EC 1.1\| .1.7)- Arabidopsis thaliana |
| | | >gi\|405611\|emb\|CAA50677\| (X71794) peroxidase [Arabidopsis thaliana] Length |
| | | = 353 |
| 990 | 2023990 | Tyr_Phospho_Site(1189-1197) |
| 991 | 2023991 | 5E-92 >sp\|P28148\|TF22_ARATH TRANSCRIPTION INITIATION FACTOR |
| | | TFIID-2 (TATA-BOX FACTOR 2) (TATA SEQUENCE-BINDING PROTEIN 2) |
| | | (TBP-2) >gi\|99764\|pir\|S10945 transcription initiation factor IID (clone At-1) - |
| | | Arabidopsis thaliana >gi\|16546\|emb\|CAA38742\| (X54995) transcription initiation |
| | | factor II [Arabidopsis thaliana] >gi\|4204264 (AC005223) 43453 [Arabidopsis |
| | | thaliana] >gi\|227073\|prf\|\|1613452A transcription initiation factor TFIID-1 |
| | | [Arabidopsis thaliana] Length = 200 |
| 992 | 2023992 | 3E-16 >gi\|3790581 (AF079179) RING-H2 finger protein RHB1a |
| | | [Arabidopsis thaliana] Length = 190 |
| 993 | 2023993 | 1E-20 >sp\|Q28735\|TM21_RABIT TRANSMEMBRANE PROTEIN TMP21 |
| | | PRECURSOR (INTEGRAL MEMBRANE PROTEIN P23) |
| | | >gi\|1370279\|emb\|CAA66947\| (X98303) transmem brane protein [Oryctolagus |
| | | cuniculus] Length = 219 |
| 994 | 2023994 | Tyr_Phospho_Site(112-119) |
| 995 | 2023995 | 3E-11 >gb\|AAD35009.1\|AF144391\| (AF144391) thioredoxin-like 5 [Arabidopsis |
| | | thaliana] Length = 185 |
| 996 | 2023996 | Tyr_Phospho_Site(1372-1379) |
| 997 | 2023997 | 7E-12 >sp\|P40389\|UV22SCHPO UV-INDUCED PROTEIN UV122 |
| | | >gi\|629909\|pir\|\|S47147 uvi22 protein - fission yeast (Schizosaccharomyces |
| | | pombe) >gi\|1076930\|pir\|\|JC2442 UV inducible protein, UV122 - fission yeast |
| | | (Schizosaccharomyces pombe) >gi\|499199\|emb\|CAA84069\| (Z34299) uvi22 |
| | | [Schizosaccharomyces pombe] >gi\|3184086\|emb\|CAA19342\| (AL023781) uv- |
| | | induced protein uvi22 [Schizosaccharomyces pombe] Length = 303 |
| 998 | 2023998 | 2E-28 >sp\|P3018510H18_ARATH DEHYDRIN RAB18 >gi\|282880 pir\|\|S28021 |
| | | rab18 protein- Arabidopsis thaliana >gi\|16451\|emb\|CAA48178\| (X68042) RAB18 |
| | | [Arabidopsis thaliana] Length = 186 |
| 999 | 2023999 | 4E-93 >sp\|P42795\|R111_ARATH 60S RIBOSOMAL PROTEIN LIlA (L16A) |
| | | >gi\|624938\|emb\|CAA57395\| (X81799) ribosomal protein L16 [Arabidopsis thaliana] |
| | | Length = 182 |

The application's sequence listing, which the Patent Office published only in electronic form, follows.

SEQUENCE LISTING (999 sequences)

SEQ ID NO: 1 - DNA, 1769 bp, Arabidopsis thaliana
  misc_feature (1)...(1769): n = A,T,C or G
tagcagttgatatggtaggtgaagggcttgttgagaaatcttctgctatcaaaatggtggagcctcaacatcttgatcaactacttcacccacagtttcatgatccatcggggtatcgtgaaaaagtggtggccaaaggcttacctgcgtcaccaggagcggcggttggacaggttgtgttcacggcggaggaagccgaagcttggcattctcagggtaaaactgtgattctggttcgaactgagacaagccctgacgatgtgggaggtatgcacgcagcggaaggtatattgacggctagaggaggaatgacgtcacacgcggctgttgttgctcgcggttggggaaaatgttgcattgctggttgttccgagattcgtgtcgacgagaaccacaaggttctattgattggagatttgacgattaatgaaggcgagtggatctcaatgaacggatcaaccggtgaggttatattagggaaacaagcattggctcctccggctttaagtccagatttggagactttcatgtcctgggctgatgcaatcagacgtctcaaggttatggcgaatgcggatacacctgaagacgccattgcagctaggaaaaacggagctcaaggaatcgggctttgtaggacagagcatatgttctttggagcagataggattaaagcagtgagaaagatgataatggcggtaacaacagagcaaaggaaagcttctctcgacatcttgcttccttaccaacgttcggatttcgaagggatcttccgtgctatggatggtttaccggtaacaatccgtttgttagaccctccgcttcacgagtttctcccggaaggcgacttggacaacattgtacatgagctagctgaagaaactggtgtgaaagaagatgaagtcttgtcacggatagagaaactctctgaagtgaatccaatgcttggtttccgcggttgcaggctcggaatatcgtatccagagctaacggagatgcaagcgcgtgcaatttttgaagctgcagcgtcaatgcaggaccaaggtgttactgtcattcctgagattatggttccacttgtaggaactcctcaggaattgggtcaccaagttgatgtaattcgtaaagttgcaaagaaagtatttgctgagaagggtcataccgtgagctacaaggttgggacaatgattgagatccctcgagccgcgctcattgcagatgagattgcgaaagaggcggagtttttctcgttcgggacaaacgacttgacgcagatgacgtttggatacagtagagacgatgtcggcaagtttctaccgatttacctcgccaaaggaatcttacagcacgacccttttgaggttcttgatcagcaaggtgtagggcaattgatcaagatggcgacagaaaaaggacgagcagctaggcctagcctcaaggttgggatatgtggagaacatggaggagatccatcttctgtgggattctttgctgaagcaggacttgactatgtctcttgttctcctttcagggttccaattgcaaggcttgcagctgctcaagtagttgttgcatgatgaagaaaaaacttggtgttattctgtgaataaaaaagcttnnntttctgttccataaaaatgaacaaaatcaaagatattggatttagctatttttgtttccttctaaagaatgtagaatataaagccttcatgtaataattgaattgctaataaaataaaaaccattgtttctaaaaaaaaaaaaaaaaa

SEQ ID NO: 2 - DNA, 1684 bp, Arabidopsis thaliana
  misc_feature (1)...(1684): n = A,T,C or G
gcgtccgaagcgattctcactaaaaccctcgaacacatcgcctttatctctttctctagatctactcgctatggctactatcaccgttgttaaggctagacagatcttcgacagtcgtggtaatcccaccgttgaggttgatatccacacgtcaaatggtattaaggttacagcagctgttccaagtggagcttccactggtatctatgaggctcttgagctnnnnnatgnnnnntctgactaccttggaaagggtgtatctaaggctgttggcaatgtgaacaacatcatcgggccagcacttattggaaaggacccaactcagcagactgctattgacaacttcatggtccatgaacttgacggaacccaaaacgagtgggggtggtgcaagcaaaagcttggagccaatgcgattcttgctgtgtctcttgctgtctgcaaagctggggctgttgtcagcggcattcctctatacaagcacattgccaaccttgctggtaaccccaagattgtgctaccagttcctgccttcaacgtcatcaatggtggatcccatgccggaaacaagcttgctatgcaggagtttatgatcctccctgttggagctgcttctttcaaggaagccatgannnnnnngtggaagtttaccaccacttgaagtctgtgattaagaagaagtacggccaggatgccacaaatgttggtgatgaaggtgggtttgcaccaaacattcaggagaacaaggagggtcttgaattgctcaagactgctatcgagaaggctggatacactggaaaggttgtcattggaatggatgttgccgcttcagagttctactcagaagacaagacctacgacttgaacttcaaagaagagaacaacaatggctctcagaagatttctggtgatgctctaaaggacctgtacaagtcctttgtcgctgagtacccaatcgtgtccattgaggacccatttgaccaagatgactgggagcactatgctaagatgaccactgagtgtggaaccgaggttcagattgtcggtgatgatttgttggtcactaaccccaagagagttgctaaggcaatcgcagagaagtcttgcaatgctcttcttttgaaggttaaccaaatcggatctgtaaccgnnnnnatcganncagttaagatgtngaagaaagcaggttggggagtgatgaccagccacagaagtggtgaaaccgaggacacattcattgctgacttagccgttggcttgtccactggacaaatcaaaaccggtgctccttgcagatccgagcgtcttgccaagtacaaccagcttttgcgtattgaggaggagttgggatcagaggcaatttacgctggagtcaacttccgcaaacctgtagaaccctactaaatggagcttttagaagcaaagtggtcttctttgtgacgaggagaagatgacctgagtttgatcatttgctttaattaaataaaacgttctgtttttgtttcttctttgtttggtttcttacgtcttttgttgaaccctttttgggaaaagttactcatttttgtaagggaaacatgagaatgctctgcctttgtcgaggacggtagccccttatttcaatctaatttcggctttactctttaaaaaaaaaaaaaaaaaaaaaaaaaaaaaaaaaaaaaaa

SEQ ID NO: 3 - DNA, 1612 bp, Arabidopsis thaliana
  misc_feature (1)...(1612): n = A,T,C or G
cccgggcaggtgtcgtcttcagcttcatcggccgttgcatttcccggcgataagagagagaaagaggagaaagagtgagccagattttcatcgtcgtggttcttgtttcttcctcgatctctcgatcttctgcttttgcttttccgattaagatcgtagaccatggccgatgctgatgacattcaacctattgtctgtgacaatggtactggaatggttaaggctggattcgctggagatgatgctcccagagcggttttccccagtgttgttggtcgacctagacatcatggtgtcatggttgggatgaatcagaaagatgcgtatgttggtgatgaagcacaatccaaaagaggtatcctcacattgaaataccctattgagcatggtgttgttagcaactgggatgacatggagaagatttggcatcacactttctacaatgagctccgtattgctcctgaagagcacccggttctacttaccgaggctcctcttaacccaaaagccaacagagagaagatgactcagatcatgtttgagacctttaattctccagctatgtatgttgccattcaagctgttctatcactttacgccagtggtcgtacaaccggtattgtgttggactctggtgatggtgtgtctcacactgtgcctatctacgagggtttctcacttccacatgctatcctccgtctcgaccttgctggtcgtgaccttactgattacctcatgaagatccttaccgagagaggttacatgttcaccacaacagcagaacgggaaattgtgagagacatcaaggagaagctttcctttgtcgctgtcgactacgagcaagagatggagacctcgaaaaccagctcctccatcgaaaagaactatgaattacccgacggacaagtgatcacgatcggtgctgagagattcaggtgcccagaagtccttttccagccatcatttgttggaatggaagctgcagggatccacgagacaacttacaactcgatcatgaagtgtgatgttgatatcaggaaggacctttacggtaacattgtgctcagtggtggtacaactatgttctcaggtattgcagaccgtatgagcaaagagatcacagctcttgccccgagcagcatgaagattaaggtcgtggcaccacccgagaggaagtacagtgtctggattggtggttctatccttgcttccctcagcactttccagcagatgtggatctctaaggcagagtatgatgaagcaggtccaggcattgtccacagaaaatgcttctaaactaaagagacatcgtttccatgacgggatcacatttctttctatttctccaatttgtttgtttcaaatttttttcccctttgtcatttgtgcactatgtgagaaactttccggttacagcgtttggagagatgtctaaggaggagcaggtttgaaaacnnnctctcgctcttacctgaggcactaatccgcgtttcaaactcagcttcattctctattcttgtccatttgtttgtttgtttgtagcctcttcaaactcggataaaaacaaaagtttttggactattgatatttgtactttatttgacagaaaaaa

SEQ ID NO: 4 - DNA, 1581 bp, Arabidopsis thaliana
  misc_feature (1)...(1581): n = A,T,C or G
gcttcttatggaactcgctcttggggtggtgagtttcacgagatcaacactgatattactgttttcaaagcatcaataccagagacaagagtggttatctgcgagcgtggtggatggccgacttggtccggcgattcaactgttttcttccaccaccaagcagacgacggttggtggagcatcttccgggtagatataccggagaatttcacggaatataccgatttcccaatcacaccaatccgagtcactccatctggactccattgcttcactcctgcagctttccgcgacgggaaacgaatcgccttagcaactcgccgtcgcggcgtcaaccaccgtcacatcgagatttacgaccttgaaaacacaacgtttcagccggtgactgagtcactcaatccgagtttccaccattacaaccctttcgtgtctccagactccgagttcctcggctaccaccgattcagaggcgagtcaactcaaggcgagtcaatcgtacctaacatcgaatccatcgtttcaccaatcaaaaccctccgattactaagaatcaacggatcgtttccatcatcatctcccaacggtgatctaatcgcattgaactccgatttcgacatcaacggtggaatcaaagtatctaaatccgacggttcaaaacgatggacgttgatcaaagaccgtacagctttctacaattcatggagtccaacagagcgtcatgtaatctacacatctctaggtccaatcttctctccggcgagaatcgcggttcagatagctcgaatcaagttcgatccatcagatctcaccgctgataaagaagagcttccttgtgatgtgaagattctcactctagagaacactgggaataacgcttttccgtcttgctcacccgacggtaaatcaatcgtgttccgatctggtagatcaggtcataagaatctctacattgtagacgccgttaacggagaatctaacggcggtggaatacgacggttaacggatggaccatggattgacactatgccttgctggtctccgaaaggagatctcatcggattctcatctaatcgtcataatccagagaacacggccgtgttcggtgcttacgtggtgagacctgacggtactggtttgaggaggattcaaatttcgggaccggaagggtctgagnnnnnggcgagggagagagttaatcatgtgagtttcaataaagatggtgattggcttgttttcgcggcgaatttgagcggagtaacggcggagccggtgacgatgccgaatcagtttcagccttatggggatttgtacgttgtgaaattagacggaacgggattgaggaggctgacgtggaatgggtatgaagatgggactcctacgtggcatactgctgatgaattggatttgagtcagttgaatttgaacggtcaagatggtgacaagcttgaaggtcagtttgaggagccgttgtggatttcttgcgatatctgaatgcgatttctccttttcttataaaagactgtcatatttatgtaatctcgctttttttatttcaataaaacaaacaaaaataaatgc

SEQ ID NO: 5 - DNA, 1566 bp, Arabidopsis thaliana
  misc_feature (1)...(1566): n = A,T,C or G
gggagatgtatgggatgatggtgtttacgaaaatgttagaaaggtatatgtagggcaagcacaatacggtatagccttcgtcaagtttgagtatgtcaatggttctcaagtggttgttggagatgaacatggaaagaagacagagctaggagttgaagagtttgnnnttgatgcggatgactacatcgtatacgtggaaggttaccgtgagatagttaacgatatgacgtcagaaatgatcacgtttctttctattaagacttttaaaggcaaaacctctcatcctatcgaaaaaagacctggggttaagtttgtgctacatggtggaaaaatcgttgggtttcacggacgttcaacagatgttttacactcccttggggcctatgtttctttgtcatccactatcaaattgcttgggaagtggattaaggtggagcaaaaaggagaaggtccagggctaagatgctcacatggcatagcacaagtagnnnacaagatttactcctttggtggcgagttcacaccaaatcagnccatcgacaaacacctttacgtctttgacctcgagacccggacttggtccatttctccagccaccggagacgttccacacctctcttgtttaggtgtccggatggtgtcagtaggatcgaccctctatgtctttggaggccgagacgcttcacgccaatacaacggtttctactcgtttgacacgaccactaacgagtggaaactgctaactccggtcgaagaaggacccactcctcgtagtttccactcaatggcagccgatgaggaaaacgtttacgttttcggtggagtgagtgctacggcacgactcaatacactagactcttacaacatcgttgataagaagtggtttcattgttcgactccaggagattcccttaccgcaagaggaggagcagggctcgaagtggtgcaagggaaggtatgggttgtgtatgggtttaacggatgtgaagtagatgatgttcattactacgatcctgttcaagacaagtggacacaagtggaaacattcggtgtgaggccttccgaaagaagtgtattcgctagtgcggctcttgggaaacacattgtgatttttggaggtgaaattgcgatggacccgctagctcacgtgggtccaggtcaattgaccgatggaacttttgcattggacacagagacgttgcaatgggagaggctggataagtttggtggagaggaagagactccgagtagcagaggatggaccgcgtccacgactgctaccattgatggtaagaaaggacttgtgatgcatggtggtaaagctccaaccaatgaccggtttgatgatctcttcttttacgggattgactctgcctaattaaggcagatttggtgatcatgaacgtttgtgaatgtgtgtgtgtgtgtgtgggtctgtgtttgtgtgtgtaataagggaggggtataccaccatatgatccttccccagcttgaccattgttttttttttaatatgtttttctttctacatgtttgtttcacgtttcatgttgtatccagcggccg

SEQ ID NO: 6 - DNA, 1496 bp, Arabidopsis thaliana
  misc_feature (1)...(1496): n = A,T,C or G
tcgagcggccgcccgggcaggtcatctgatctcaagtgatttcaagtggttggttctgttccttttctcgtccccgatcaagtttcttctcctaaactccagaatttggtcttgaagatctctaaaggctcttcctttttgttcatttctctacccagatatcgatgggtacatacctaagttctccgaaaactgaaaagttatcagaagatggtgagaatgataagctcagatttggtttatcgtctatgcaaggttggcgcgctaccatggaagacgcgcatgctgcaattcttgatcttgatgataagacatcgttcttcggtgtgtatgatggccatggaggtaaagtcgttgcaaagttctgtgccaagtatctacaccagcaggttatcagtaatgaagcgtataaaactggagacgtcgaaacatctcttcgaagagcattctttagaatggatgacatgatgcaaggacaaagaggatggcgagagttagctgtacttggcgacaagatgaacaaatttagcggcatgattgaaggatttatatggtcaccaagaagcggtgacaccaataaccaacccgatagttggcctcttgaagatggtcctcattctgatttcacgggacctacctcggggtgcacagcgtgtgtagctcttattaaagataagaagctctttgttgcaaatgccggtgactcacgttgtgtgatatcaagaaagagtcaggcttacaatctttctaaagatcacaagcctgatcttgaagttgaaaaagaaaggatattgnangctggtggctttattcacgctgggagaatcaatggaagcttgaatctgacaagagccattggtgatatggagttcaagcagaataagtttttaccatctgaaaagcaaatggttactgctgatccagatataaacactattgacctatgtgatgatgatgactttcttgttgtnnnnnnnnntnnnanatgggattgtatgtcaagccaggaactagttgattttatccatgaacagttaaaatctgaaacaaaactttcaacagtatgtgaaaaggttgttgatagatgtttggctccagatacagcgactggtgaaggttgtgataatatgaccatcatcttggttcagttcaagaagcctaacccatctgagactgaaccagaagattccaaaccagaaccaagcgaagatgagccgagctcatcaagctagatatctttaaagagccaagaggaagaagatttgtgaaagtgtctcttttatcattgactttttgttcaacattgtaaatccttttgaatgtggcttagattcaagaagctggctttttcccagtttagcttcaagaagtctgagatgtcacagagtttggtttaatcttaaaaggacctttgtatagatatttcttgtgattgatgttttcagctatagtttaaaaaattcacaaggacaagctttttgtaccaaaaaaaaaaa

SEQ ID NO: 7 - DNA, 1493 bp, Arabidopsis thaliana
ttttttagataaaaaagaagaatttaactcataaatccaaaattctttaaaatcgaagagtctaacaaactctctcaaacatgaattattccataagtaaaaatagttggcgtcagaacgatataaaatttggtttagggcacatgcctccctaagtcttaagcaaaaaaaatttcatcaacatctcagtttattgcgggccttaaaaccgcaattaaaatcgaaaaaaggaggaagaagcaatgcttaggcacctcctgatccgtacttcttaccgaagacaatcagctgcaatttgtcgtaaccagaaagcacaccagcacctgcaacagcacgcagaatgttggcaccagctcccttgaagagtgacttggctccttcattcttgaggatctgcttgaaggcgtccaaagaactcttgtacttgacagcttcaccagacgtcatcatcattcttctgcggacagtgtcaatggggtaggatgcaagacccgcaccattggtaataacccatccaagagcgaaactagcgaagaaactgtcctgtaagtcaccagtgaggagaacaggcttcacagagtcatagagtccaaagtacagaccacggtagacaatgataccaacacatgagatgttgaatccacggtacagaccagcaataccatcagtcttaagtgtctttctgtagacatcaacaagaccatcaaactgtcttccaccacctcctttctttgcagccttggcatcattagctagacgggtacgggcatagtcaagggagtacacaaacagaagggaagaggcaccagctgctcctccagatgccaagttaccagcaaaccacttccagtaaccatctctgtccttcttaaagttgaaaagtcttttgaagtaatctttgaaggcaaagttcaaggcctgagtggggaaataacggataacattggcagtgtttcctctccatagagaaccaaaaccttcatccttaatcgtcctgccgaaacagtcaccaatacccttgtagggttcagaaagcctgccagctttaatcatctcatcctggttctggatcaaaagcttaacacgttcaataggagcagcagcagtcttggagacggcagcagaaacaccacccatcagaaagtcaagggcaaagttagtgaaccccttctctcctggggtttggacaaacacgggagaagcagttgttgccaacatccgggatgtcggaggaaattgaaatgcagcattggagtagtttccgtaggttgcatgtctttgatacatagaaggcctctggtaacccacttgaacgtccttggaaacacttgaacgcatgaactgcccggcagctttctgcgcaatagtggggtgctgaacttgatcaaccattttgaactctaagaatcgatggatgagcaaaataactggagagagactccgcctttatctcacaggaaatgagagggcgaagcagagaagagagacgaagt

SEQ ID NO: 8 - DNA, 1469 bp, Arabidopsis thaliana
  misc_feature (1)...(1469): n = A,T,C or G
tttttttttttttttttttaggcaaatgtgattacactctggaacaaatcttaggtttgggaaagaaattcaataacaaaacacacaaagcgcaaaaagagagaatcccaattcagaaaaagaggtaaaaggaaatgagtgcgacgaacttacagccttacaaaagtaataatcaatcatcttttctttaggcttcttcttcttcttcgtcctcctcgtactcctcttcaccgactgtagcatcttgatattgctgatactctgcaacaagatcattcatgttactctctgcttcagtgaactccatctcgtccattccttctcctgtgtaccaatgaaggaaagcctttctcctgaacatggcagtgaactgttcactcacacgcctgaacatttcctggattgaagttgagtttccaatgaaagttgatgccattttcaaaccagtgggagctatatcncngnngcntgatttcnnnntatttgnaatncattcaacaaagtatgaggagtttttgttctggacgttcatcatctgttcatcaacctctttggtactcatctttccacggaagacagcagaagctgtcaagtaacgaccatgacgaggatcagctgcacacatcatgtttttggcatcccacatctgttgagttagctcagggacactcaaggcactgtattgttgagatcctcttgatgtcaaaggtgcaaaaccaaccatgaagaagtggagtcgtgggaaaggaataaggttcacagcaagttttctaaggtcagagtttagttgaccagggaaccgaagacagcatgtaacaccactcattgtagctgagatgagatggttaaggtcaccaaatgtaggattagcaagcttcaaggtacggaaacagatatcgtaaagagcttcgttatccaaaaccatacattcatcagcattctcaacgagctggtgaacggaaagagtagcattgtatggctcaacaactgtatcagagaccttaggagatgggaagaccgaaaaggtcatcatcatacgatctggatattcctctctaatcttagaaataagaagtgttcccatgccagaaccagttcctcctcccaaagaatgacaaacttgaaaaccttgaagacaatcacagttctcagcttccttcctcacaacatcaagcacagaatcaatcaactcagctccctccgtgtaatgacctttcgcccagttattcccagcaccagactgaccaaaaacgaagttatcaggccggaaaatctgaccaaacggcccagatctgagagaatccatagttccaggctccagatccataagaacagcacgaggaacgtatttgcctccgctagcttcgttaaaatagacattgatcctttcaagctgtagatctgtatcgccacatgactgaccggtttgatcaataccgtgctcgccgcaaataacttcccagaactta

SEQ ID NO: 9 - DNA, 1424 bp, Arabidopsis thaliana
ctttttttttttttttttttttttaaagaagaagctccacaacattcatataaagtcagaaaatgtcagccaaaacattctcttattcacagagagatgatgtcgtttggtagaatactgtaatacacaaaaataaagttttaagttcatttacaagaagaaaggcttatatcccattgtttatcgatcgatcccttcgatcttgtcttccacctgcgagtacaattccttgagcttctctatgttttcagcggaagtgtcccagtagccacgaccattggcctccaagaaagtctgaagcattttcctgaaggagttgggattggtgttcatgagacggttcagcatctcctcgtcttggatgaaagttgagttggcctcctcgtagacccaattgtctacttgacctgacgttgcactccatcccacagtgttggacagtctcttctctatctcacgaactccttcatatccacttgacatcattccttcgtaccactttggattcagcagctttgttcttgcgtccagcctcactgtctcagatagtgtcctcacctgcgcgtttgcagttgtagtgtcagcaatgtaagagcttggtttcttcttatccttcctcaaactctgaactagatttgtagggtcagaatcgaagtagtggctcacatcagtcaaagaaatctctgaagaatccaggttctggaaggtgacttctgcagtgctaagagccatctcaaagacctgcttcttctcagccattcctgctccaggagcatcactatcaaacgcaaacgatttgcggctcaagtacatgtcctgaagctgtttctcatcgttccatgacgagttttcaacagcaagactgatgttggctgagtatgaccctgaagcgtttgagaaaactcttgtcgctgcctctctaatatcaatgccaagcgcctctgcttgttccaacgcgtgtttccttacaaaattttgctctacaggctcatctagctccgccaccatcttgatagctcggtcaagaaggttcatctggttgataaagagatcacggaagacccctgagcagttaacaactacatcgatcctcggccttcctagttcttctaagctcacaggctcgacacggttcactcttccaaaagtatcagcaattggtctcacaccaatcatccaaagaacctgcccaagacctgcccgggcggccgctcgattctggcgcgccggtcgcggccgaggtaccttagcacccaagtcagtatccgatggctgaagactctcgaacactccgatcacttcacctgtctccggtttgctctttgtgatcttcaaagtgatctctccgacggaagccccgtgttcttgacgttttccttggatagctcttcctcgtctcctctgcctccggcaggcaaagccac

SEQ ID NO: 10 - DNA, 1364 bp, Arabidopsis thaliana
ttgtaatccaaactaaaaagcaatcttttaaccaatactacgacaagcgatttcgaatggagtcataataaagtttacaaaacacttaacaaagacccaaaataacacactaaatactacatgacatagcaaaagacttcagtttcggatacaactactttgagagacatcttttgtttgtgaatccaacacaatcatctgtctgcatctccaatcattcctctgctggcggcgaacgagaggggctctcgcgtatcgggctgtctgctccatcgtatcctcttccagcttctacttccattatttgcccagggctctcaacttgaccattctcagggcttgacttcgaccttgaccttgacctctccctcctcttctcatatggaggaggactcctgctttcccttctcttctcatatggcggaggactcctgctttccctcctcttctcatatggaggaggactcctgctttcaccacgtccttttcttgggcttcggttccttacagctccattctctgggctagccactctctccctcctacggtcatccctcttgtaatctgggctaagcctggctctcttgtaagggctggggctgcgtcttccacgaccataatcaggactagtcctttcccttttgtgagctactggactagcacctcggccatagtcaggacttcccctttctcttctgtaaggacttggtgatcgccttctcctatcaggtgacctatcacgccgtctttcaggactgtatccatttcctcttgaatcatcatctttcactgcatactccactgagatcaccttatccatcagcttactggaatttgtagcatccagtgctctggtagcatcttcttgtgcctcatattggatgaatgcaaaattccttctgattctaacattaacaattttaccatacggctcaaagtgcctctccaagtcccgagtcctagtgttttgtgcatcgaagttgatcacaaacagagtcttggaaggtctcaagccagaagatgatctcctcgaaccacctgatcttccagcacctccacggtcattctttgtccactcaacacggagtctgcgtcctgtgcgaccatattcaaagcgatcaagcgctcgaattgcatcttcagcatccctttcatcttccatatagacaaaagcaaacccagctttcatatcaaccctctcaaccttgccgtactttctgaaaagccgctcaagatcactctcacgagcatcatactcaaagtttccgcaaaagacaggcttcatgattccttagaacaagcagttgaaaaatcgtaccggccgtcgagagtcgaaaccctagaaacaagcttctctagatttt

SEQ ID NO: 11 - DNA, 1339 bp, Arabidopsis thaliana
  misc_feature (1)...(1339): n = A,T,C or G
tcgagcggccgcccgggcaggtgcatgcggcggcgataggtcctatggtcgacctagggacgtgggtcatgagctctaaacttatggacgcttccgtgacgcgtggcatggttttagggcttgtgaaaagtacgttttatgaccatttttgcgccggtgaagatgccgacgcagccgctgagcgcgtgagaagcgtttatgaggctacgggtcttaaagggatgcttgtctatggcgtcgaacacgccgatgacgctgtatcttgtgatgataacatgcaacaatttattcgaaccattgaagctgccaaatctttaccaacatctcactttagctcagtggttgtgaagataactgccatttgtccaattagtcttctgaaacgagtgagcgatctgcttcggtgggaatacaaaagtccaaacttcaaactctcatggaagctcaaatcgtttccggttttctccgattcgagtcctctctaccacacaaactcagaaccggaaccgttaaccgcggaagaagaacgggagctcgaagcagctcatggaaggattcaagaaatctgtaggaaatgccaagagtccaatgtaccattgttgattgatgcggaagacacaatcctccaacccgcgatcgattacatggcttattcatcggcgatcatgttcaatgctgacaaagaccgaccaatcgtttacaacacgattcaggcgtacttgagagacgccggtgagagactgcatttggcagtacaaaatgctgagaaagagaatgttcctatggggttcaagttggtgagaggggcttacatgtctagcgaagctagcttggcggattccctgggttgcaagtcgccagtccacgacacaattcaggatactcactcttgttacaatgattgtatgacattcctgatggagaaagcatcaaacggttctggtttcggtgtcgttctcgcaacacataacgctgattcggggagacttgcgtcgaggaaagcgagtgacctcgggattgataaacagaacgggaagatagagtttgcacagctatatggtatgtcggatgcattgnnntncgnnntnnngagagcannnnnnaatgtnagcaagtacatgnngtttggacccgtcgcaaccgctataccgtatcttctccgacgcgcttatgagaaccggggaatgatggccaccggagctcatgaccgtcaactcatgaggatggaacttaagaggagattaatcgccgggattgcgtaaagagagagtatggagccatnaaatgaaattgggaaatgtagatgaataaatttcttctatgtagtttaagaaattga

SEQ ID NO: 12 - DNA, 1332 bp, Arabidopsis thaliana
  misc_feature (1)...(1332): n = A,T,C or G
tctccgttcatcttccggtagatctgccgccaaattaggcaaccgtaaccccaggcttccttctccttcacccgcgcgtcacgccgctccatgtagctacctcctcggccgcgtcgccgagtacgcgacctcttcacctgcaagctcagctgcgccatcttctgctcctgctaaggatgaggggaagaagacctatgattacggtggcaaaggtgcgatcgggcgtgtttgccaggtcattggtgccattgtcgatgtgagatttgaggatcaggaaggattgccaccaatcatgacatctctcgaggtgcaggatcaccccacaaggctagtgcttgaggtgtctcatcacttgggtcagaatgtcgtcaggaccattgctatggatggtactgagggtctcgttcgtggaaggaaagtcctcaacactggcgctccaatcactgtacctgtcggaagggctactcttggacgtatcatgaatgttcttggagaacctattgacgaaagaggcgaaattaagaccgaacattacttacctattcacagagatgcaccggctttggttgatctagctactgggcaagagatcctggccactggtattaaggttgttgatcttcttgctccttaccaaagaggaggaaagattggtctctttggcggtgctggtgttgggaaaactgtgcttattatggagctgatcaacaatgttgccaaagctcatggtggtttctctgtgtttgctggtgtgggagaacgaacccgtgaaggcaatgacttgtacagagaaatgattgagagtggtgtcatcaagctaggcgaaaagcagtctgagagcaagtgtgctctagtgtacggacaaatgaatgagcccccgggtgcccgtgcccgtgttggactgactggtttgactgttgccgagtatttccgtgatgctgaaggccaagacgttttgcttttcattgacaacattttccgtttcactcaggccaactctgaagtgtctgctttactcggtcgtatcccgtctgctgtgggataccagccaactctggcttctgatcttggtgctcttcaagagcgaattactaccaccaagaaagggtctatcacctcagtccaagnnatctatgtacctgctgatgatttgactgatcctgnnnntgctacaacttttgctcacttggacgccacaactgtgctctcaagacagatttctgagcttggtatctaccctgcnnnggatcctttggattcaacatcccgtatgctgtcacctcacattctgggagaggagcattacaacacggctcgtggcgtgcagaaagt

SEQ ID NO: 13 - DNA, 1326 bp, Arabidopsis thaliana
  misc_feature (1)...(1326): n = A,T,C or G
taacattgagaagcaactagttcttaaacccgagtacgattcaaaaggtggtaaggactctctagaaggtatcaaaacacgagtaacagagtaaacctctacggagatacaaagagccttttcacttaaagcatttggcgtccaaaagagcctcgccttcaaatggctcagcgtcttcaatcatctggctaacacgctccttctgtgcttcatcggagatatcaaccttagtccactcgtacagctccatgtcgtacacctcatccattatgaacttggggatctctggtccacggaaaagccataaacccttcaccttgaaaggaccctctgacccgcaaataagcatctttccaaaggagtatttacgtgccaagtccatacgctgaaggaaccctcctaccttgttgagtgtaacaaaggagaccatgttctcatcgttgtacttatagtcacagaaccatagtgagtacccctccgggtcatacatgtcccagaatcctttgatagcaacctcacggaagttggatttggtgttcgagtaaagcctcttccagtcatcgagaaccattgggcttggtggtagcaagtcaagaggattcttggctttaggctttggtgcttcctcctcctcagcaggctttggtgcctctgctacaggggctgccttcttgggctcctccttgggcttagcaggctgtggagctttcttagtaggaactggagggacagcttcggtttgtttggcatcacccaacaccttcttgaattctggctggttaaccattgtccagaagtatctctcaacatgagggaatgcagaggtaaannncttggtcatcacggtggcaaatcccaagttcaagttgcagattgtgacaatatcagcaagggtgacagagtgtccaacaannaaagtgttggaggcgagatgtgtgttcagannctcaagtcctctcttcaatgcagaaattgccgcttcctcagctggggcagagaagggagnatnncccattctnnnnnnaaaccacttcaacatgttagcatcaatctccaatgaggagaaatcgatccattgctcaatgtgagcgtattcaataagggaggatncattcaaagagttgtcaccattcttacggctcacatatcgggcaatggcattgctctcaaatatgggaccttcaggagtctcaagcacaggaacctttccaatagggttcatcttaaggaactcaggtgacttgttagtgacgcccatctgaaagtctgcggactcctcgatcttcacacccgcatactctgcagcaataagtgccttattggcac

SEQ ID NO: 14 - DNA, 1320 bp, Arabidopsis thaliana
  misc_feature (1)...(1320): n = A,T,C or G
gaggatgatgatgatgatggccgatacatgaatagagaaggagaactcagttttgattacagaacaactgagcagaaggtagaagcttcttctctctctacaccatgggccacaaagatggatgatacagacctctcgtttcctcgcccttctacaacaagaccagcagcggtaaatgctgatcatagagaagaatatncagtttcaacccgcgataagtatttgagcagccattcagctccgttgttcccagaaaagaaacctgatgtatcnnnnnggttgagacaggcgaatccatcttttaatgcctacgtattaccaacaccaaatgattcaaggtactcaaaaccggtttcccaagcattaaatccgaggccaacaaaccacagtgccggaaacatatggcattcatctccgttagagccgataaaaagcgggaaagatgggaaagacgccgaaagcaacagcttctacggccgcctccctcggccttctacaacagacacgcatcatcatcagcagcaagcagcaggaagacatgcattttctggacctctcagaccgtcctcaacaaaacccatcaccatggctgacagttattcaggcgctttttgtcctctgccgactcctccagtactccaatctcaccctcattcatcatcttctccaagagtctcccctaccgcttcacctcctcctgcttcttccccaaggctcaacgagcttcacgagcttccaagacccccnngccactttgcaccacctccaagacgagccaagtcccctggtctggttggtcactcagcgcctctaaccgcatggaaccaagaaagaagcactgtcactgttgctgttccgtccgccaccaacattgtggcctcgccgcttccggttcctccgttggttgtccctagaagctactctataccttcaagaaaccagagagctgtttctcaacggctggtcgaaaggagagatgatatagtagcatccccaccgttaacaccaatgagcctgtctaggccacttcctcaagccacaggagttgctcagaccagtcaaannngaggagtaggaaagctgatcgaacgatgaggctgccgcgtctgcgtcacgtttgaccaaaacgctgattgtacaaattcagagatcttcacaagtgaatatagaagtcagtatatgtattattctttagttggttaatctcctttttttttttcccattgtaaatctgaagcctctgctctttattcccttttcattttcaatcccctcaaaaaaaaaaaaaaaaaaaaaaaaaaaaaaaaaaaaaaaaaaaaa

SEQ ID NO: 15 - DNA, 1312 bp, Arabidopsis thaliana
  misc_feature (1)...(1312): n = A,T,C or G
ccggagtccgctcagaagatgattcttaaaggcagtggagatctcattgccaagggtcttgtagaccaaaaagatgttacaaacgatgctagtgactatctttggtacatgactaggcttcatctcgacaagaaagatccactttggagccgaaacatgacgttacnnnttcacagcantgcccatgttctacacgcnnacgtcaatggaaaatacgtcggtaaccaattcgtaaaggacgggaaatttgattacagatttgagaggaaggtcaatcatctcgttcatgggactaatcacatttcacttctcagcgtttccgttggactacagaattatggacctttctttgagagcggaccaactggaatcaatggtcctgtgtccttagtcggatacaaaggagaggaaacaatcgagnnggatctctcgcagcatcaatgggactacaagattggtttgaatggatacaacgacaaacttttcagcataaaatctgttggtcaccaaaaatgggcaaacgaaaagctacctactggtcggatgttgacatggtacaaggcaaagttcaaggctcctcttggtaaggagccagtgattgtggacttaaatggtctcgggaaaggtgaggcttggatcaacggtcagagcattggtcgttactggccgagctttaactctagcgatgatggttgcaaagacgaatgtgactaccgtggggcgtatggtagcgacaaatgcgcttttatgtgcggcaaaccaactcaaagatggtaccatgttccacgatcgttcttgaatgcgagcggacataacactatcacactattcgaagaaatgggcggtaacccgtcaatggtgaacttcaagacagtagtggttggaacagtttgtgccagggctcatgaacacaacaaagtggagttgtcctgccataaccggccgatttcagccgttaaatttgcaagctttggaaatccgttggggcattgtgggtcattcgcggttggtacgtgccaaggagacaaggatgctgcgaagaccgtggctaaagagtgtgttggcaaactcaactgcactgtcaatgtgtcttccgacacgtttggttctactttggactgtggagattcacctaaaaaattggccgtggaattggagtgctagattagatcttagctctagctagctagtgattgcaataatttccatcaaataatgtcgtacttgtttttgatctatcaggttttttagatgatttggatttaggattgtggaataaatattatgatcgaataaaaaaaaaaaaaaaaaa

SEQ ID NO: 16 - DNA, 1308 bp, Arabidopsis thaliana
gatattgctctatggaagttcgagaccaccaagtactactgcacagtcattgatgccccaggacatcgtgatttcatcaagaacatgattactggtacctcccaggctgattgtgctgttcttatcattgactccaccactggaggttttgaggctggtatctctaaggatggtcagacccgtgagcacgctcttcttgctttcacccttggtgtcaagcagatgatttgctgttgtaacaagatggatgccaccacccccaaatactccaaggctaggtacgatgaaatcatcaaggaggtgtcttcatacctgaagaaggtcggatacaaccctgacaaaatcccatttgtgccaatctctggattcgagggagacaacatgattgagaggtcaaccaaccttgactggtacaagggaccaactcttcttgaggctcttgaccagatcaacgagcccaagaggccatcagacaagccccttcgtctcccacttcaggatgtctacaagattggtggtattggaacggtgccagtgggacgtgttgagactggtatgatcaagcctggtatggttgtgacctttgctcccacagggttgaccactgaggtcaagtctgttgagatgcaccacgagtctcttcttgaggcacttccaggtgacaacgttgggttcaatgttaagaatgttgctgtcaaggatcttaagagagggtacgtcgcatccaactccaaggatgaccctgccaagggtgctgctaacttcacctcccaggtcatcatcatgaaccaccctggtcagattggtaacggttacgccccagtcctggattgccacacctctcacattgcagtcaagttctctgagatcttgaccaagattgacaggcgttctggtaaggagattgagaaggagcccaagttcttgaagaatggtgatgctggtatggtgaagatgactccaaccaagcccatggttgtggagaccttctctgagtacccaccacttggacgtttcgctgttagggacatgaggcagactgttgcagtcggtgttatcaagagtgttgacaagaaggacccaaccggagccaaggttaccaaggctgcagttaagaagggtgcaaagtgaactcgaatcctcaaaactctatccgcagatgaatcaaaaaacaatattagtttctttactttagtttggtatttggtcgcgtgttatagcttcgtttcttctccatcggaactctgttcccggaactgggttcttgatcggaggtggcggagctactttgcacctattttgcttttg

SEQ ID NO: 17 - DNA, 1297 bp, Arabidopsis thaliana
  misc_feature (1)...(1297): n = A,T,C or G
tttttttttttttttttttttttcagccaatagaaactataattaccaaattatatgatttcataacattttctaaataaaaataagcatacatatataggaagaaaaaaaaaaagagttacagtggcagtgagagcgcgtaaaaaaaaagtaattaaaacggtaaagaggataagatgtttgtctacggtaagactcactatacttattatacaccgactgtaaatcaacggtggaagatatgaagtcttcaggttgattgtttatccaccgtagattcgaatcagaacgttggtacgacaccgtactgtgcgtgtgctgctgaagcataaacatgactaaggaaaatgtcgtcgttttctgtctctgttcttttcgcaaaccggcctttgatccttggccgtgactctgcataagctttcctcgaagcgtaacgaatcgtcttctcaaatttcctgttctttctcttctctctgtacctcaaaaccctagcttctctatccatagagctcgcttgatgatcaccaccagtcgtcgagctagtgatcgtgctccggttaacagagttgtttgtgtttccgtcaggaactacaccgtattcaatagaagaagtcgaaacactgtggctgactgattgagaagggtaagtgaaagcagagagctttgatctgcagaaatcaatatcgaagcaatgatcattgttagttaacgggagaggctctgttttcgtctgaaccggaacaagactatctcctccggcgttgttttgatgatgattgaacgaattcggaaactcgaaatcaataagccgatcgaaatcagaaaacataaagtcagaagaacctttcatgttttcagttccgatttcgattttagncggttcgttgaaatcattaggaagtaaccacggacataaaccgagatcatcacccataaccggaacagcggttaaatcaacggtggcggatgagccaaggataccaaaagtcgaagaagctgagattttggcgacggcggtttcggctgagtcgaagaaagtttcgacggggacacgttcgtgacggctagcgagaggattagcagagtgaatatcggcatcacaagtgacgcaaagagcggcggcgtcggctttgcaagtgacggcggcgggagcttgttcacaaacttcacaaacccacacgcgctcgtggcgagtgaaggaatggattcttgtgtcacatgctatacataagaaagctgagtcaactcgacagaacgcgccgccgcgccccatccgccggagattgatttgatactc

SEQ ID NO: 18 - DNA, 1288 bp, Arabidopsis thaliana
  misc_feature (1)...(1288): n = A,T,C or G
tctagagcggccgcccttttttttttttttttttttttttttttccaccatttcgctatattattaatgggaatcatttgccacaaaatgggagaagtaactctaaaaaccaagatctcgaacgataagataaagaagcaaaaacctagattgacaagaaaacaaacatccttccaaaaacctcaaggtacttcatgagttgtcgataaaaacataagtgatagataaaaccaacaagcagatagcagagagcaacgacagcacaagtgatgagattactagtaacgaccaataccccaaactctaatgactccatcggtgtaaccactgaagagggtgcttccatcagcgctccagttaaggcttgtgcagtaaataaccttcctcttggtggcagcaggaccactgttgtcagccttttcagcctcagccttgagatcaaccttcaaatcctcaacaatgctcttgctctcaaggtcccaaatcttaataccatgttcagttgcagcacagagccagtacctgttgggactgaagcaaagagcatggatcacagagttagcttcaagagagtaaagcttcttcccctcagccaaatcccacagcaaaacaacaccgtctttgcctccacttgcannnnnngnnccatcaggtgatacagccacagtgctcacgtnaccggtgtgaccagcaagagtcgatctgagcttgcagttcgaaaggttccacactttcacggtcttgtcccacgaagcagatacaatcgtcggctgaagcgtgttagggctgaatctgacgcagctaacccaatcacggtgtccctcaccaccttctgaaatggtgtacttgcactcaccaagagtgttccacagcttgatcgtacggtcacgagatgcagagacgatctgacggttgtcgagtgagaaggcgacggagagcacgtccttggtgtgtccaacgaatctacgagtggagacaccagcagcaagatcccaaagacggagctcgccgtcccagctgccggaaagcgcgaattgtccatcggaggagagaacaacatcctcaacgaagtgagagtgaccagtgagacgcctctgagctacaccgtaggctttgtcgtccttggtgagtttccacaaaatgatggatttgtcgcgggaagctgagacgatgatgtctgcgttatcgattggggtggcgattgccgtcaccatgtcagtgtgtgcacgcatggtgcccttcaaaacgagtccttccgccattttcggtgtctggagatgcctctgaa

SEQ ID NO: 19 - DNA, 1287 bp, Arabidopsis thaliana
  misc_feature (1)...(1287): n = A,T,C or G
tttaagcaggaactgcattacaattccttaaaattcaaacttagaaacagccatagagaaaaaacaaaaggctttcaatttcagaaagctttaacaaaagaaagctactgaaatcctacaaagagaatgtacttatgaatcattattactttatggacgataataaacaaaaacaaacctaaacttttacttctctctactaaatcatcaagttcggtacttttcctctgcaactctcttccttcatctctgccataagtcggtcctttacgcctgtgtgtcctctaaaagagtaacatcagttgtctttctctctcgacttttgcttcagatgagtaaggctttcttttacctcagtttgtgatagtgttgtgtttcatctggttaaggtcttgttgtagcttggcgtcttcgtcatcatccgttttggtgaggaatttgtctacctgatctgcagcttgacgtccttctgagatagcccagacaaccaaagactggcctctccgacaatcacctgctgcgaaaacaccttccacggttgtggaaaaccggccatactcggccttaaagtttgacctgttgtcacattcgagacctagcttctcagcaagtgtnnnnncaggtccaannaaacccatggccaagaaaacgaggtctgcttcaatgatttcctcagagccttcgatctccttgaactggaacctcccggtttcatccttctcccaactcacacgcacaagttcaagccccttcacgtttccattgtcatctcctatgaacctcttcgttaagacctcatagnnnctagggtcttttccgaatttggtggtagcttcttgatgtccgtagtcaatacggaatacacgaggccactgtggccaaggntttcnnnggagctcttgttgagggtggctgaggaagaagttctaggtttacaatgttggtacatccatggcggatagatgttccgatgcaatctgtgccggtatcacctccaccaataacaacaacctttttcccttttgcagaaatgtaattgccatcctcatgattgctgtcaagtaaacttttggtgtttgcatgaagaaactccatggcaaagtgaacaccagatagatcacgaccaggcactggaagatctcttggttttgtggaaccaacagcaagaacgattgcatcattctcttccttaagtccatcaagggagtaagatgggtcctttccaatattggcattgaccacaaagttgataccttctttggtcataagatcaacccgccgttgaac

SEQ ID NO: 20 - DNA, 1282 bp, Arabidopsis thaliana
ggcctcttgacattatctggaaatagttttcttttttctgtcgactattgagtgtcaaccatattatttggaaacataaccatacaagtataaaaaacaattactccgaagtccctagtgatataaattcacaacaattcaaccattcatcccaagtaaccaaaagcctcagtcccttgtaaggtgtaaacgggtttaaacatcagcctcaggctacaaccggatacgatgaacatgttgcaacaccacacatgttctttcccatttccatcttgaagtagccattgtctccccattcacctccccatgagttctttataagccagtacgggacgtcgtcttcaactccataaccaactgctaacactgcatggtttacatccattggagtgttaccacatgtattgctagtaaaaactcccttcttataaaacctgaattcatgtacaacctcaaacgccacactcactggccttaccaacccgaccgcgtgcttcagttcatcttctgcacccagggtaatgttgacagagtcacggacttgtacaccgatgtttttcgctgaaaatttgcagccaccgtcttttccggtgtaaggataagcctcctccgtgtcgagcccaccgttgtatttaatgtattcaaaggcttgagaaggaagtccaccatgacaaccaaagttattgaaagtaccagcacaatccacaagctgttgctcggacaaagatattccttttccaaatgcttgatggtaagctgcttcaagagctccagttgtgctaaatgtccaacaagatccacaatgtccctgttctttcacagggctaacaataccatcttctctccaatcttttgtgtctggaactgtagcttcagtgatctcgtggctaccctttaaagtagcagaacagttttgagcagctccaagcttgtatctttgaaactcttgccatgtcaagtcagcaaactgattaagagagagtttataggataagcctttcttattagtggatctgattaaatcaagattctccttaaaaacagagaatcttaacttcatctcctccacactctgatacttcttcccatacctgtgagtgaagcgagaaaaggatagaacatgacgggactgtcctaggatctggacgacggtgtcttcaagctcatggagattgtcggagaccattttgattggattagattcatcgaatccgatctctttactcgccgccgccgcaaagagaatcaataggattgaggaagataggattagtttcaccgg

SEQ ID NO: 21 - DNA, 1280 bp, Arabidopsis thaliana
  misc_feature (1)...(1280): n = A,T,C or G
ttttttttttttttttttttttttgataaaaaagaagaatttatttcataaatccaaaattctttaaaatcgaagagtctaacaaactctctcaaacatgaattattccataagtaaaaaaagttggcgtcagaacgatataaaatttggtttagggcacatgcctccctaagtcttaagcaaaaaaaatttcatcaacatctcagtttattgcgggccttaaaaccgcaattaaaatcgaaaaaaggaggaagaagcaatgcttaggcacctcctgatccgtacttcttaccgaagacaatcagctgcaatttgtcgtaaccggaaagcacaccagcacctgcaacagcacgcagaatgttggcaccagctcccttgaagagtgacttggctccttcattcttgaggatctgcttgaaggcgtccaaagaactcttgtacttgacagcttcaccagacgtcatcatcattcttctgcggacagtgtcaatggggtaggatgcaagacccgcaccattggtaatannnnatccaagagcgaaactagcgaagaaactgtcctgtaagtcaccagtgagnagaacnnnnnncacagagtcatagagtccaaagtacagaccacggtagacaatgataccaacacatgagatgttgaatccacggtacagaccagcaataccatcagtctnnnnnnnnncgaattcgcggccgcttttcataaatcatgatagtaaaatacaaacatataatatttctaaacaagaaactcttcactgatggatgcgattgccttcttaacaatgatttgatacattctttgtgttggatggacagcgtcccaaaaaacgtatttggtaggatctttgcatacttgcatatctttgcatgtctctccatattcgtatgtacctgttccacaacagcctagcgaagcctcgacgaaaccaaattttctcggatttttaatggcttcttggatggtcgaataagcatcaacgtagatggttttcaaaccgattttagactgaagaagctctagatttttgatgattttggcgttaaaggagaaagcgatttggtttagttgatctacacaagttttttggcctcgtaggtatttaattaaaggcatgcatcccatgggaggaactcccactaccaccaaccttttagctccaagcctatgcaacatcttggcgtcgtaaagcatacggtgggagagaaactcgatgtattgctcaaccgtgaattgcttttgtcgagtaaaatcgactaagtaa

SEQ ID NO: 22 - DNA, 1278 bp, Arabidopsis thaliana
  misc_feature (1)...(1278): n = A,T,C or G
tcgggcggccgcccgggcaggtggcggctcaacactatcctcttctacattttccaacgatggcctcaaacgcactctcgtctttcaccgccgctaatcccgctctgtctcctaagccactactccctcacggctctgcttctccgtcggtttctctcggcttctccaggaaagttggcggcggcagagcagtggtcgttgcagcggctacggtggacacaaacaacatgccgatgaccggagtcgtgttccagcctttcgaagaggtgaagaaagccgatctggccattccaatcacatctcatgcctctctcgctcgccagaggtttgccgacgctagcgaggcagtcattaatgagcaaatcaatgtggaatacaacgtctcctatgtgtaccattcaatgtacgcatactttgacagagacaacgttgctatgaagggactagccaaatttttcaaggaatcaagtgaggaagagagagggcatgctgagaagtttatggagtaccagaaccaaagaggaggaagagtgaaactccaccctatcgtctcacctatctcagaattcgaacatgctgaaaaaggagatgctttatatgcaatggagttggctctgtctctagagaaactcactaatgagaagcttctaaacgttcacaaagtggcctcagagaacaatgatccccagttagctgatttcgttgagagtgaatttctgggagagcagattgaagcaatcaagaagatctcagactacatcacccagctaaggatgatcggcaaaggccacggagtttggcatttcgaccagatgcttctgaactagacttggacctctataagttcactttcagatgaccaatgttggggttaaaacagaagaacccgaagattctgtaaaagctttagattgaacattatggactaataagattgtagtagtaagctttgtgttcaagatggtttttgtaataactncgtaagcttaatcaattcgcggccgcctaacttctcaataaagtttgtgtaaaggtagaggaaaactagttagtagcatcatctgttgttacctgtgtttaaatccagcagagtaagcatcatcccataaatctacaacttctttgttagatgtgacgaagatgagacttccacaaaaaaggcatcttcagaattgtttcagcttcgtttgcacttgcaccaccttttgtttttcttaccttcgcattctagtccacaatcccgagactctagactggtgatgccgatttgtgcttccc

SEQ ID NO: 23 - DNA, 1276 bp, Arabidopsis thaliana
  misc_feature (1)...(1276): n = A,T,C or G
ttttttaaatgtaaacaagtttgaatagtttatgattatttattacaaatccatactacaattatacagtcttcaccgatattttgagaaccataatgtaaaaaagagaaagagaaaaaaatggaaaaacatgaaacaaagtttgatgaaatcacttccagttgttggcaacaatgtcagccaagtcaacaactctctgtgagtaaccccattcattatcataccaagcaatcaccttaaccatatcatctcccataaccatagtgagtgatgaatcaatggtcgttgaaaaatctgagcatctgaaatcaacggacactagtggctcatcgcagacatcgagtatacctttaagctctttctctgcagaatctctgaaagcagcgttgacttcctcagcaaatgtcttctttgagacctgcacaacgagatcaaccactgatacgtttggtgttggtacacggagagcgatcccgttgagttttcctttgaggttagggagcacaagagccacagctttagctgctcctgtagaagtaggaacaatgttcaaagcagctgctcttgctctccttagatcacggtgactcgcgtctagcaacctctggtcaccggtgtaagagtgagtagtcgtcattgtaccctttatgataccgaatttctggtcaagaactttgacaaagggagcaagacagttggtagtgcaagatgcattgctgatgataggttcatcatgactgtaagcatctgcattgacaccaacgacataagttggaatatctcctttgcctggagcagtaatgataaccttcttggcaccagcttcaatgtgtttccctgcaccttctctatccacaaacactccggttccttcgatgacaatgtcaattcctagctccttccaagggagaagagacgggtttcggttagagacaacttggatgatctttccatcaacagagattgcagtctctccagaaggtttgacatcagcatcaaagattccgagagtagagtcgtatttaagtaaatgcgaagcctgcttgacgccaccagtgtcattaatggcaatgatatcaagaggagagtccttgcgaccatgccaacatctcaggaagttcctcccgatcctaccgaatccattaatggccaccttaagntnggcctcagtcacacctttcctgtatccaccacnnntcccattgcagaagtctggaaggagacgatggaaacgaactcatcggaagaaagtttcttgccgaagggaagagaagca

SEQ ID NO: 24 - DNA, 1270 bp, Arabidopsis thaliana
tttatatttattgtaacagcaacatacatttttagatgacattgcagaacacaaaatcacaaacaaacctaagaggctaaacatctaaacacatgtctatatttcaaatgagacttttctttcttatattttcacccaataagggtttctttcttcaagtttgcacactgaagtacacattgtatgtttcatctcttaagctaaacaatggcgataacacaaagttcctctgtgttccgctcatcacgaaactcattggattgtattgatgcattcctgtctttaaactaaagcttgctgcctctttaaacttctcatcagtcgcatccgaaccacattctagccttagttttgtcccttgctttagggtttgatcgctgtacacaaaacaaccttttttgctctctagtcttaacgaaacgcttcctagcttcccgtcaagtccagatactaaccgaaagctagaagctcctttgtcactaggagaagaagcttgaactgtgagggagctatcagttgcttgctttacaatcatgccagggaaatcaaacggctcaagcatgaccagccttccaattagtccttctggacccgaaatccgtggtttagaattatcagtcacgagcctgaaagtcgctgcaacggcatcttgtgtccctggctcgggtgatactctcattgtgatggtttggttgctatttgaaaacacgtaagatatgtttccagatttttgtgagagtgtgacaaggtaactgttttgagtttcaggtataggggttatccattttccaggtttagcctgagttgtgatgctccagtccctgctcgtgtgtccggctaacaagtaggggccatagagtatggcttgaagagatgcgtactctggccgatcatctttaatagcttcggttctgatactcattggtagctccatggttacttgatcaccagatttccatttctgtttgattgataggaaattacctgaagttggtacgtttaagggtcgcccattcaaagatactttggcacctatagagttagtccaaacaggaattcttagattcaaagtcgactccttcgccactcccactttggaagaagaaagagtgaatgtcacacgcatgtacggatcccacgacacaacaggattaactttctgagatattgaaagaccagcagatttccaatcaagtgagcttgatatatattgggtgacataaagagctggagttgcaccatcttcttgaaaatatatggaatctcccag

SEQ ID NO: 25 - DNA, 1267 bp, Arabidopsis thaliana
  misc_feature (1)...(1267): n = A,T,C or G
tttttttttttttttgttctcaactcttggtttagtacttgtaataagtttcaatacatttttagtaaaacagtgatgctttgatacataattcaaagaaaaacaaatgtatgactcaatgtgtgatagaaacagcgatttgaaaagagaatataagaaaaatacgtgagatcaaccgaggagagaaaagccctgtccaattagggcagtggcaagaatctcattggcagcttcagaaggatgcacactgtcccagaacacatactgagtagcattggagcatgtcccaaacgatttcgggttgcacaagagtgaagttgtctcgactgttcctgttccacaacatcctttggttgcttccgtgaatccggatttggaagggttctgaacaagatcataaagtggagagtagatgtcgaagacaacaatcttaagatcggaatattgcttctgaagctttgaagcagcagcgttaagcttcttgttaaagttttgagcatctgtgttgagtcttgaaacacagcctttttcatggaaaccgaaaagggttcttgcagcgggaagacatcctgtnnnangcagagatgtcacaccgatcttccttgctccaaccgcatacacttgcttgataaatgtagagaagttatcgataaggaaagatccgtatgcatcaacagtgtaaactttgtaaagcagaggattcacatagtagttttgaacaaaatcactgcttcctgcacttaagagacagattgctccctttatgatcgaatcagcttttttgcttcctgcaatttttattagcttgctcttgtattccttgaaatactctacttgctgatacaacgggatcgcgtgattgagaagagcagctttgtcatcataacctgaagctgcagaagcgaaattagcaccaatgagaagattcttaccagaagcttcaggacttagataagctggtgggtacttagtgaagcctaaagtctcagcagttatatcagtggctaatttgccgttgcagaaacgaccggtggctttgtggttagcgaaatcacggccataaggaggataatcagctctgaaaagggtcggaagatagttgttgttgccgacatcaactacagagtcaccgaatgtcatgattgctggaacaagttgagcaaaggagatttggagaatggacaaggtagagaccaatgtgagaagcaaaaacgacgacgtgcaacgatccatgtttttgctttgacctgcccgggcggccgctcga

SEQ ID NO: 26 - DNA, 1266 bp, Arabidopsis thaliana
  misc_feature (1)...(1266): n = A,T,C or G
cgaacgatctatgattactaaacagaggaatctcaatcttctttaggacttgatacgacatcaacgagatactgattcaacttctgtccaaacgtcttcacagagaatgattcaacgacatggttcctggcttcagctcccattctattcgccaactcaggattctcgatgaatctagccatcgccgaactgaaatcttctggagttggttcacaaagatagcctgttactccattctttaccgtctccacggggccaccactgttgcaggctatcacgggtttgtatgcagccattgcttctaatggaacaataccaaaatgttcatccgtgggggtgtagagaacgcacaagcagcttgagagaagttcatttctttcagcggttgaacaagatgtgataaagttaactcgatcagaaactccttctttctcggctaaacttctgagctcctccaagtactcaacattctccttcaatcgctcgtcatatccacctgcaacggtaagggtaacatcactcagattttgcttatgtttgcataggatagcaaaagctgaaacagctagatcgatgnnntttttcctctcaaagcgnnnnatggagagganattcancttataagtgtggggttcaatgaactgatcaatattgactgcggggtaaagtacagctgggcgactcccttgtgcatttagccttttaaatgtattggcaaatgttgatgccgtgaagttactgttaacaaggatcatatcagccatccctgttgtttgttcttcaatgaaatcaatgggtttccgatacatccgtctaagtgttgttgtatgcttagctagcaagagatccgggaaatggcagtagaaaacaaccttagatgaccttttgagtttcagcaatgggactacgactgaaacttggtctgctagtacaacatcgaatgaagaccaacccaaaagaacacagagagcaacaaacaagcaccgcaaatatgcacacactgcgtgtagtcggtagaaaatatgccgtggcaggaaagatccatacaccgtaacttgaaagataccggaaagagtttcctcgaagcatctggatttgtcgtggtgagaggtgaagatatgaactttatgaccgtgcgaggcaagctcaacggccgcatcaacaatcaatctctctgctccgcctattccaagatctggatgtataatggcgatgttcatctttgaaccttcttttttcgccatttacagacttgactggtttacg

SEQ ID NO: 27 - DNA, 1261 bp, Arabidopsis thaliana
  misc_feature (1)...(1261): n = A,T,C or G
tcctctgctcttccctttgccaagagatcttcttccgatgagtttgtttccttcgtcagtttccaaacttctgcaatgagaagcaatggtggatacaggaaaggggtgaccgaggccaagataaaggtagccatcaatgggttcggtaggattggtaggaacttcttgaggtgttggcatggtcgtaaggactctcctcttgatgtcgttgtcattaacgacactggtggtgttaaacaagcatcacatctcctcaaatacgactcaactcttggaatctttgacgctgatgtcaaaccttcaggagactcagctctctctgttgatggaaagatcatcaagattgtatctgatcgtaacccatctaatctcccctggggggaactaggcattgacttagttatcgaaggaaccggagtgtttgttgacagagacggtgctgggaagcaccttcaggctggagccaagaaggttcttatcactgcacctggaaaaggtgacatcccaacttatgtcgttggtgtcaatgctgaactttacagccatgaagatacgatcatcagcaatgcgtcttgtactactaactgtctcgctccattcgtcaaggttcttgaccagaaatttgggatcataaagggtacaatgacaactactcactcatacactggtgaccaaaggttgttagatgcgagccaccgtgatctaaggagagcaagagcagcagctttgaacattgttccaacatctacaggagcagccaaagctgtggctcttgtgcttcctaacctcaaaggaaaacttaacggaattgcattgcgtgtgccaactccaaacgtttcagtggttgacttagtcgtgcnngtctccaagaaaacttttgctgaagaagtcaatgctgctttcagagatgcagctgagaaagagcttaaangtatccttgacgtctgtgatgagcctcttgtctctgttgacttcaggtgctctgatgtatcctccactattgattcttccctcacaatggttatgggagatgatatggttaaagtgattgcttggtatgacaatgaatggggttactcacagagagtcgttgatttggctgacattgttgccaataactggaagtgaagactcaacaacctcttgatgtctgctccattattttttactgttacatgattcggaatgtataattgtagttcctgagtttattatgtatttgtgctctataatttatagtaataaacttgattcaaacaaa

SEQ ID NO: 28 - DNA, 1253 bp, Arabidopsis thaliana
  misc_feature (1)...(1253): n = A,T,C or G
tttttttttttttttttttttttttttttttttttttttttttttttttttttttttgtttaacatgcacttggattattattgagagttgaaatacaaaggcccgttacaagcccaaacgaaggtacataaaagaaaagcagaaaatgaaaacgaaatcgatagggataagtttttccaacagacggaaacacaaactacaccaggtgaaatagatcacctcccaagtgcatgagacacgaaccaaccacttatcatcagatcacaaaaagcttagaagcttccaccacgaagacgaagaaccaagtgaagagtcgactccttctggatgttgtaatctgcaagtgtgcgaccatcctcaagctgtttaccagcgaagatgagtctctgttggtctggtgggatcccttccttgtcctgaatcttagccttgacattatcgatggtgtctgagctttcaacctccagagtaatggtctttccggtaagggtcttcacaaagatctgcataccaccacggagacgaagcacaagatgaagtgtcgactccttttggatgttgtaatctgcaagggtgcgtccatcttcgagctgcttaccggcaaagataagcctctgctgatccggaggaattccctctttatcttggatcttagctttgacattgtcaatggtgtctgaactctcannnncnagggtgattgttttannagtgagggtcttgacaaagatttgcataccaccnctgagacgaagcaccaaatgaagggtcgactccttttgaatgttgtagtcagcaagagttcttccgtcctcaagctgcttaccggcaaagataagtctttgctgatccggagggattccttccttgtcctggatctttgctttgacgttatcaatagtgtcagagctctcaacttccaaagtaatggttttgccagtcagagtcttgacaaagatctgcataccacctcttaaacggagaaccaaatgaagggttgattctttctggatattgtaatccgccaaggtacggccatcttctagctgtttaccggcgaatattaatctttgctgatccggaggaatgccttccttgtcctgaatctttgccttaacattgtcgatggtgtcagagctctcaacctcgagggtgattgtcttgccagtgagtgttttcacgaagatttgcatcttgaaagagagagtcgcgagagatttgcagagatcactttaggctttgacctgcccgg

SEQ ID NO: 29 - DNA, 1250 bp, Arabidopsis thaliana
  misc_feature (1)...(1250): n = A,T,C or G
gatatggacagcttctggcaattaggtgatgagctacgaggtcagacgagagcatcagaggatcacaaatggtctactgttgcaacgaagctagctgagcaaactagaatgaaaggggagaggatgaacaatcttgatctctccaaaggttacactgagtttagaccaagtgagaaattcagtttccaggagaacaatcttaacttcaacatgttgaatttggatggtaaatttggtgaaagcatcatggggaagacttcgatgcagagcaatgtttataatatgaatactgttttccagaagaatgactttaagagtggaggcaacatgaaagttaacaagtataatggtaatgttgttgctaacaaggagatgagcaacaacaaacataacaacaactgcaatgataatgggaatatgaatttggctgttgacaagaggtttaaaaccttgccagcttcggagactcttccgaggaatgaagttcttggtggttacatctttgtttgcaacaatgatactatgcaggaggatatgaaacgtcacctctttggtttacctccaagatacagagactctgttcgagctataacacctggattgcctctgtttctttacaactacaccactcaccagcttcatggtatctttgaggcaacaacttttggaggtactaatattgatgctactgcttgggaagacaaaaagtgcaaaggagagtcaaggtnnncggctcaggtaaggatcagagtgaggaaaatctgcaaagccttggaagaggactccttcaggccagtacttcaccactatgatggtccaaaattccgccttgagctctctgttcctgagacattggatctgctagatctttgcgaacaagctggttctgcataagccgaaacgatcaaccttgcaatgccacgttgcaaagagggggatgttttgtatgaaatctatctatatatgtaagacctaccgtaagagcgtaagcttttgggatttagttaagagtcggattcaaatgtatgtttactaagaagggatgagagtatgtgtggtcttaaggcaagcaaaagagcgaagaggctctgccgaataagcgactactcttgttctgtgtcgtgtctgatgtgtgagtgtgtgtctgtgtttgtgagagattcgatactctttgaaacaaagatttatgtagaagaatatagagaaagaaagactactataaacagagccaaaaaatgatgtgagctaaa

SEQ ID NO: 30 - DNA, 1249 bp, Arabidopsis thaliana
tcgagcggccgcccgggcaggtcgatagtacacttctacgtgcaattttctcctttctcttcctggacatctgtctgtttattacattttcttgtaatctctttttggggttttacaatatctatcccctaaagtttcggaaaattctgtttttctgttctcattcttcgtgatctttttcactttcttcaaaaaaaaaacatgtgtggaatacttgccgttttaggatgttccgatgattctcaggccaagagagttcgtgttcttgagctttctcgcagattgaggcacagaggacctgactggagtggcttatatcagaacggagataattacttggcccatcaacgtcttgccgtcatcgatcctgcttccggtgatcaacctcttttcaacgaggacaagaccattgttgtcacggtgaacggagagatttataaccatgaggagctgagaaaacgtctgaagaatcacaagttccgtactggtagtgattgtgaagtcattgctcacttgtacgaggagtatggtgtggattttgttgatatgttggatggaatattctcctttgtgttgctcgacacacgagataactctttcatggtggctcgtgatgcgattggtgtcacttcgctctacattggttggggactagacggatctgtgtggatatcttcagagatgaaaggcctaaacgatgactgtgagcatttcgaaacgtttcctccaggtcatttttattcaagcaaattaggagggtttaagcaatggtataatcctccttggttcaatgaatctgttccttcaacgccttatgagcctcttgcgataagacgcgcctttgaaaacgctgtgattaagcggttgatgactgatgttccatttggagttttgctctctggtggtcttgattcttcccttgttgcctccatcactgcacgtcacttggccggtactaaggcggctaagcaatggggtcctcagctccattccttttgcgttggtcttgagggctcaccggacttgaaggcagggaaagaggtggcggaatatttggggacggtgcaccacgagttccacttctcggtgcaggacgggattgatgcgatagaggatgtgatttaccatgttgagacctatgatgtgacgactatcagagcgagcacaccgatgttcttgatgtcccggaaaatcaagtctctaggggtcaagatggttctctccggcgaaggtgcggacgagatctttg

SEQ ID NO: 31 - DNA, 1245 bp, Arabidopsis thaliana
  misc_feature (1)...(1245): n = A,T,C or G
ttttttttttgtataactacttttatatcctctcgtccaagaaaattgtttctaattggtggtttgtccaaggaaatgtactacctttctgagctgtcaaaggaatttacgaagctgattctgtataaacgccaatttcattaacaaaaaaaaaaaacaaaaaaaaactgtccacatgaacacaagtaagaaccaacaacagcttcttcaaaatgcttattgcaatctccacttatacgttatctaaaccatcactctgcaattcatctttgttccttgcaggaaccaatctttccgttcctagtctctcctctagagctcttgcccctctttctctcctcctggatgcttcagcagaatcagaacctggcaatggtgcaccactggtagaataatcatggtcttcactggtggcatttgatcttccacaaagcatccggtgaaagattaaggcaatggggtcaattactggcctgagaagttcaggaaagaaagtagagaaggcaaagtcatcacttggatcacctctgagctttgtttctggtctcctctgtaggtacctgaggtataaccagcccatatatgtaccaaatatcaaagtgggaagatatgctgctgaatctagtgtgaagaagcttgaggctattgacaaaattagcataattgagggnaaccactttgcttttatctttaacagcaatatctcctggtcaggtattatctgctttatccctacaagaaggcctgccaagacaccatgaaaannagcaaagggcatatataggtaaacttccagcctcgttatgtagtataaggcaatggctgtaacgaaaacacagagatacgtaaggaagttcaccacaaagatgaacttaaggaactccgtggaaccccagacaggttccaggaactttcccataaaaaggagagaaacggtgctgaagacaaccccatatactgagagttcaaaatagccgcttgttatcagattccaggcaaaaggaatagtcctcgccggaatcagagcaaggtatgggacggtagcgggaatgaactgaaccacgaggtgtcccaccacaagtaccagggcaagtcctttgcagagcttagtgaaattggtgaacatactcgttcccggagaactcatgtctccagacttgagcaagagtgtaacaacaaatctgagatcctgacgatagatctcgtcgacgcagctcaaaccggagattattttcggacgcgtgg

SEQ ID NO: 32 - DNA, 1245 bp, Arabidopsis thaliana
  misc_feature (1)...(1245): n = A,T,C or G
tttttttttttttttttttttttttttttttttttttttttttttttttttgagagaaaaacgagttatttgattaatgaaaaaaaatacaaagtcttgcaaattttacatctaaacaagctctctttctcctctcacactcacgaagcaaagactgaagcaaaatacagataaaacttggctcactttccgggaacaaagttggtggcgaaggcccatgcgttgttgttaactggatcggccaaatggtcagcaaggttctctatcggtcccttaccagtgacgatggcttgaacgaagaatccaaacatagagaacatagccaatcttccgttcttgagctccttcaccttcaactcagcgaatgcctctgggtcggtagccaaacccaatgggtcgaagctgccaccggggtaaagcaagtcctcggcctctcccaatggcccatttcctgcgactctgtagccttcaacggctcccatcaaaataacttgtgtggcccaaatggccaaaatgctctgagcgtgaaccaagctagggtttcccaagtaatcgagccctccatcgctgaagatctgtgaaccggccttgaaccaaaccgcctctccgaacttgactccgttcctagccaaaagctcagggaagacgcagcctagggctccgagcatagcccacctgctgtggataacttctagctcacggttccttgcgaatgtctcggggtcagctgaaagtccggcggtgtcccatccgtagtctccggggaactctccggtaaggtagctcggtgattcgccagagaatggacccaagtacttgacacggtcagatccgtaccatgggctgcctgatgggccctttggcttggcaacagtcttcctcattgtcacacggccgcttccaaggacttcagatgccgcgggggaaagcttgacggccttaccggcgaaggcaggggaggagagagccattgttgaggcggccattgaggttgagtagtgcagcacaaagtaaaacgtttaagatttgttgttgtgtccatagaagggttacaagctctcaagattgctccaagtttttgtgacaattgtaacttcataatatagcgttcataacatgtaactggttgtatatcttttttaattcatgatgccnnnnntattctaattgtgtttcttctttaagaaacgtcgactataatcaaaaacagacaatttatctaatcgatcagaaagaaatatcttt

SEQ ID NO: 33 - DNA, 1244 bp, Arabidopsis thaliana
  misc_feature (1)...(1244): n = A,T,C or G
ttttttgttaaacttggaaaaaccttatcattttattagcaagtgaagccttaaattgcaacatacgtcttttctaaatcattacatttgaagaagagaaacaaaaacagagcggaatgccgaatttgtttctcttctcgattcaaccatccgaaaacaagaatacaaaaagagaagataatcgcggaaacagattacgtaatagaagcttgagttgttttgtttctatttcttttcgagaaagctccgaacttcagcatctgagggaagagctggaatggctccttttttggtcgttgtgattgctccacaagcatttgcgaatctcagcactttcctcaatctctcttcgtcctcgagaacggatcgatcatcgacaatctggtttagaagagcaccgacaaaggaatctccagctccggttgtgtccacagcgttcacatggaaagggtcaacggctcctttgaaagtcttggtgtaataccgacagcccttttcaccaagagtgactaacaacagcttcaagttgggatgccacaaggtcaacgcggtctcatcatcaatcttgttgcttccagttagaaactcaagctcaacatcgctcaccttgatgatctcagctttgtcccaaatgctcatgatctgtgttttggcttcttcttttgatggccacagaggctccctgaggtttgggtcataggaaagaagagctcctgcttctttcgccacttccatggccnncaaatgagctgacctacacggctccactatcaaacttattgatccatagtgaaacactttcgcggatctgatgaggtcgagattgagttcatcaggacgaagaagcatatcggcgctaggattgcggtaaaacataaactcacgatctccatcagcacgtaacgtaacgaaagctaaagcagttctagctccagtatcgaagttaatcccctgatcatcaacaccgttcttcctcaaaatcccagccaacatatgaccgaactcgtcgtctccaagttttccgacgaaagcagatcgtccaccgagacgagaaacagcgattgcgacgttagcgggagcaccgcctggagctttgaggaatccaggagcttcggcgagagagacgcctgattcggtagggacgaaatcgattagcatctcgccgaagctaacgatcagtcctttatcaccgttggatgccatttagatcagagatctgtgaaatcgttggatcaaatcggaga

SEQ ID NO: 34 - DNA, 1233 bp, Arabidopsis thaliana
  misc_feature (1)...(1233): n = A,T,C or G
gcttgccaataagcacatacttctctgccatgaagctgctttggctcatggagaatgtggatgatgtcaaagacgctatcaagaaaggggatgccatctttggcactatcgacacatggttgatctggaacatgactggcggtatcaatggcggccttcatgtcactgatgtcaccaatgcttcacggacaatgctcatgaacctcaaaaccttgagctgggaccaggacactttgaagacacttggcataccggctgaaatcttgcccaagattgtcagcaattcagaagtgattggagagatctgcaaaggctggcctattcccggtatcaagattgctggatgtcttggtgatcagcatgctgcgatgttggggcaagcttgcagaaaaggcgaggcgaagagtacttatggcacaggtgctttcattcttctcaacaccggagaagtgccaatcaaatcaggtcatggtcttctgaccacgttggcctacaagctcggtcctcaagcacagacaaactatgcattggagggttcgattgccatagcaggagctgctgttcagtggcttagagacagccttgggataatcaaaagcgcctctgagatcgaagatttggcagcaatggtagattctacaggaggagtgtactttgtgccagcgttcaacggcttgtttgctccttggtggagagaagacgcacgtggtgtgtgcattggaatcacgaggttcaccaacaagtctcacattgctcgggctgtgctggagagcatgtgtttcnaggtgaaagacgnccttgactccatgaacaaagatgcaggtgaaaanngttcccttaataannngaaaggggagttcttgctcagagttgatggtggtgccacagctaacaaccttctgatgcagatncaggctgatctgatgnnaagtccggtggtgaggccagtggacatagagacaacagcattaggagcagcctatgcagctggattagctgtgggattctggaaggaagcagacatattcgagtcgggagagaaggcgaagaactccaaagttttcagacccgctatggaagaaggaatcaggaagaagaaagtggcgtcttggtgcaaagcggtggaaagaacatttgatctcgctgacctctctatctaaaacttgaagaagttgatctcagagatgtcctctttatttaccacagttgggctctgtcttccaagtcacataa

SEQ ID NO: 35 - DNA, 1230 bp, Arabidopsis thaliana
cgcgtccgtgactataagacttaatcaagggactttttgttcgggtttggttttaaacgtcttggattcgaagtggttaaggtatggatgaaaataatggaggttcaagctcacttccacctttccttactaaaacatatgaaatggttgatgattcttcttctgactcggtcgttgcttggagcgaaaacaacaaaagcttcatcgtcaagaatccagcagagttttcaagagaccttcttccgagattcttcaagcataagaatttctcaagtttcatccgtcagcttaatacatatggttttcgaaaagtagatcctgagaaatgggaattcttgaatgatgattttgttagaggtcgaccttaccttatgaagaacattcatagacgaaaaccggttcatagccactcgttagtgaatctacaagcgcaaaatcctttgacggaatcagaaagacggagcatggaggatcagatagaaagactgaaaaatgagaaagaaggccttcttgcggagttacagaaccaagagcaagaacggaaagagtttgagctgcaagtaacgacattgaaagatcggttacaacatatggaacaacatcagaaatcaatagtggcatatgtttcacaggttttgggaaaaccaggactttcactaaacctcgaaaaccatgagagaagaaaaagaagatttcaagagaactctcttcctccaagcagttcacacatagaacaggtcgaaaagttagaatcttcgctaacgttttgggagaatcttgtatcggaatcatgcgagaagagcggtttgcagtcatcaagcatggatcatgatgcagctgagtcaagtctaagtattggcgatacacgacccaaatcatcgaagattgatatgaactcagagccgcccgttaccgttactgcgcctgctccaaaaacaggcgttaacgatgacttttgggaacaatgtttgacagagaaccctggatcaaccgagcaacaagaagttcagtcagagagaagagatgtcggtaatgataataatggtaataagattggaaatcaaaggacgtattggtggaattcagggaatgtaaataacattacagagaaagcttcttgacatgaatgaggtttttgtaaaatagttttcttttggttccactgagattattgtatctgtgttcattatttattactctgtttctgtaaaatcaaaaaaaaaaaaaaaa

SEQ ID NO: 36 - DNA, 1228 bp, Arabidopsis thaliana
  misc_feature (1)...(1228): n = A,T,C or G
tgccaattttcttcttttcatgggtaaaccaaatcagacacattgaaaaaaacgatatcctggtttagaaacagaccagggacaatactcatcaaagagaccaaagaggttataaaacagtgtttggagatctttcaaacacacttcttattcggacaaagccctgaaaggctttaactgatctcacaccttatagatgaaaattttgctccagaagggtttaagagaggcatgagtacgccaagtccttctcttccttgagctcctctgcagtcaaatccatcttcttccttgatacttcatcaatcggaaggccttggacaatactccagtctccattgcgacaagttacagggaaggagtagataagtcctgatggaacgctgtaagagccatcggagtatactcccatggaaacgaacgtaccctctggagttccaaggacccagtcacggatgtggtcacaagcagagctagcagcagagagcgcactagacaacttcctcgccttgatgattgcagctccacgttgttgaactgtagagataaattctccgtccaaccatgcatcgtccttgacgagctcacggacaggcttctctccagacgaggtctgcactttagcatggttgacatctgggtactgtgaggatgagtggtttccccagatgatcacgttcttaacatcagacactggcacgctcaacctctcagagatctgtcccaaagccctgttgtggtcaagccttgtcaaacaagagatgttcttttcagggattgatggtgcaaattccttgaggatcaatgcgttggtgtttgccgggttggccacaacaagannnntgcagttaggagcggcatgcttctccannncagcagcctgagacttgtagatggnaacattcttggacatcacatcctnnnnntccataccnnctttcctcgggaaaccaccaaccataacagcaacattgactccagtacatccctcaacggcatcagttgtagcaacaacacctttaagaagagggaaagcagcatcgatcaactccatcttaacaccgttcaaagcttcagcagctggaggaatatccaacatgtggaggataacaggttggtcagcaccaagcatgataccccttgcaatcataggtacaagagcatatccgatttgtcctgcagctccagtaacgagcacacgaactggttctttcgccatcggatctag

SEQ ID NO: 37 - DNA, 1226 bp, Arabidopsis thaliana
aaaaaattcttcttctactaacttacgcttcaatggcgactccaactccatctctatctcctcctccattgaatctctggataatcttatcagaatcaaaacgaatcatcaacgcacactcacgtcacttcctagctctctccgttctcttcctcctccctctctgcttctccatcacagtttacccttccgtcttccttctcatcaccgatcaatcatccgcttctcacaacaccgtctctctcctccgcggcggactccacaacaacaacgatgatgacatcgataccaaaacaacggtcttacttgtaatcggttacatcgttgttatcaccgtcttcaatctcttagctattggatcaatcgcttatagtgtgtttcaaggattctatggtagacctgtgaaattgaactctgcagtgaaatcgagcttcgcttcgtttttacctcttctcgctactttgacctcatcgaatcttatagttttagggggttttctgattccagggattttagctttcttgttggttaagcttattgagaccattcccggtgtagaattcgattacgcctcttcgtatttccaaggtttcgtaaccctagtaacgattatctcgattgcgattgcagttaagctctatgtgaattggattcttgcttgggttgttgttgttgttgaatcagcttggggtataacaccgttgaagagaagtaaacgcttggttaaaggaatgaaatgtgcttctttgtcgattatcttcttcttcgcttcaacggaatcgattctcgtttggattagtaccttagccgcctatgctcagctcaacgataacgagaatggtgggaagtcgtggacagatgctttctttgtggtacagattgtgatcacgtctgcgtttctaacgctgttgacgttgtataatcttgcggcgactactgtgatgtatatgtattgtaaagctgttcatggtgagcttgtttgggagatagccgaagagtttgctagagaatatgttagcttgccttttgatgatggtaaagttcctcacttggtctctgtagcttacaacaacatctgatgaaatgatgatgatgatgatgatgatgatgatgatgatgatcttgtttgttttgttgttatgttttaaggtagtgtttggaaaactggtcttcttgtatgataatgcaagtttgtaacccttgtacgtatattgatcttctttact

SEQ ID NO: 38 - DNA, 1220 bp, Arabidopsis thaliana
tttttttttttttttaagccggaagaaaagttggattacgaaaaagaagaagattaagattacataggctcatggaataagagcaaagaagagaatgtgcatgtgccaaatgccaaacacaaaggcatgccttgtttcttcaaaagagcaaattatgcaaaagtacatatttgagaaacaagaacactaacaataaggtttgggaagagttatggcaataaacaaagatctctccctatgtgaataataatcataagaggtggtgaagaaaaaaagaagaagaagaagacaaaacatgagaggatcgaagatcagtcatatgtttggttttactacacagtgtagtgactgggagtttcaatgtccaagccctttagcttcacgactgattccacatgtcccttgagtgtgtgcagctccctaagcctagcgatctcagctcttctcttagcttgctcagcgatctcagacaattctctgtaacttcctttctcagggaagatgttaacagcttcttttggctgtaaaccgtgaagtgtcctttgagcaagtgcccattgagcctctctctcttcttttccgtaatctttcttcatcgtgaaagccgtcttgttctcaaacaagttgagccacgcctttccgctcaagatgtatcgaatggcaaacttgaaaacgtccaatgggaagtatgtgacaatactgtatagccagatcacaccagcccatccccatccaatacccctaatctttgcaaattcccagttggcgtaaaccgcaatcaaagtagcaatcagttgtgcaatgaggaaagcaatcatcagcaatgctccaggacgttcaacaaaagaccaactccttgatcttgtgacgaagatcagagcttgactaatgatactaacttgtaagtacaccgcacccattagctcgtggttattgtccctaatggacctcacaccgaatgtgtccgagaaaaagtcagtcttgtgcgccgcccagaagaaaataacagtcatgatggcctggtagcctcctagaacgactccagtagcaaaaatttctttaagtttccagctatcaggtgtgggagatggcttaactctgtcctttgagattgtcatgatggtaccgtcgttaagaatggcaatgatcagaaccatgaaggctgagaagtcaaattcccatatcaaagcaataagcatgaaaccaaacacaatacggat

SEQ ID NO: 39 - DNA, 1212 bp, Arabidopsis thaliana
  misc_feature (1)...(1212): n = A,T,C or G
ggccgcccgggcaggtcacatgtatacacacatatagttacaaacacacatacacaaaacacagatatataaaaatgtcttgttataataaagcactattgatcggcaacaaagtcgtcgttatacttgtattcctcttatgtttggttcactcgtcagagtcacttcgaccactgtttgcatgtgatccagcaaacgggttaacccggacgctccggttctgtcgggccaatgtaccgatccatgtgagagttcaagatttgctcggaaggctcacgttgcaggagaagatccgcaacctcgtcaacaatgctgccgccgtaccacgtctcggtattggaggctatgagtggtggtccgaggctctccacggcatttccgacgttggtccaggcgctaagttcggtggtgcttttcccggtgccaccagcttccctcaggtcatcaccaccgcagcttctttcaaccagtctctatgggaagagatcggacgggtggtgtctgatgaggcaagagctatgtacaatggtggcgtggccggtctgacatattggagtccgaatgtgaatatcttgagggacccgcggtggggccgaggccaagaaactcccggagaagatcctatcgttgccgcaaaatatgccgccagctacgtccggggacttcagggtactgctgccggtaaccgccttaaagtcgccgcatgttgcnnnnattacactgcttatgatcttgataattggaatggcgtcgaccgtttccacttcnncgcnnnngtcacncnnnnnnntttagaggacacatacaacgtgccattcaaatcatgtgtttacgaaggaaaagtagcgagtgtaatgtgttcgtacaaccaagtcaatggaaagcccacatgtgctgatgaaaatctcttaaagaacactattcgtggtcaatggcgtctcaatgggtacattgtctcagattgtgactctgttgatgttttcttcaaccaacaacattacactagcactccggaagaagccgccgccgcatccattaaagccggtttggacttggactgcgggccgtttttggcgattttcacggaaggtgcagtgaagaaaggattgttaacggagaatgacatcaatttagcacttgctaatacattaacagtccaaatgagacttggtatgtttgatggtaaccttgggccgtacctcggccgcgacc

SEQ ID NO: 40 - DNA, 1209 bp, Arabidopsis thaliana
tgatgaaatgtaatttattcaagaagagagagatagatagatacacgagagagcacaaatgatacaatcaaattgtcagttttacttggtcttacttgacagccaaggaaacaaaagaaattgaatgttgcagactgatgaatcctgagtttccgagtatataagttctttgtgtaactgaagaagccaaactcttagtgagcgttgcgtgtgatcaagccctcgaatatgacgtagagatctctgttatcgcctccaaatatctcttcagctttcctaagtgtttcttctcttgtttgcttgtgggcgttaagatccttcacatttccaagaaatgcaccaaattgctcgtaagataatcggctcctgacttgtcgaaagaactcttttccatcaacccgagttctcgcagtttgtgaaccaggctctgagattgaaatagaagatctagtatcatcaaacatgcctctagtggtagcgaacgatacagaatggcgtcgaggagagataggtctcgaagttgttttcggtgtaccagaagcagataagattggtggagaaccaggaggagtaagccgtggcgtagtagtttgtgatactaacggaagactagctgataaacttggtttaggagcatcgttttcgttgtcagttgcagctggttcaatggcttcagaagcttgttgagattggattgatgaatgtcttgaaggttgaaatggagtatcatcatcgtttggtgtcggcttagcgatgatttgcgttgttcctgcattttggtcatcatcttgaagagacatcataagcgtcttcctaaaaccctcaagctttgagacatctctctgaagtctcttgacagtattagacaaagaagcattttctcttatcagattctccttttcaccatcagcgagagaaagcttatgaaacgcatcggaaagagaagcctcgagagactcaacgtgagactggagttcttcaaattctttttctttctcggcgagaagttcccggagatccgacgactctgattcgagagctgagacacgtgtcgagagagcaatggatgtgattttgcgagctacatctagctgctcgaatggatcggacggtagaacttgaagaagttcatcgggaagatcgaaacttctcgaacctgtaattgcacttgctgatccttcttcttcttcttcttctatctctcggacg

SEQ ID NO: 41 - DNA, 1205 bp, Arabidopsis thaliana
  misc_feature (1)...(1205): n = A,T,C or G
tcgagcggccgcccgggcaggtcgagcaaaagaagaagagaaacaacaagaagtagtaatggcttcctctatgctctcctccgccgctgtggttacatccccggctcaggccaccatggtcgctccattcaccggcttgaagtcatccgctgcattcccggtcacccgcaagaccaacaaggacatcacttccatcgcaagcaacgggggaagagttagctgcatgaaggtgtggccaccaattggaaagaagaagtttgagactctatcttacctccctgaccttagtgacgtcgaattggctaaggaagttgactaccttctccgcaacaagtggattccttgtgttgaattcgagttagagcacggatttgtgtacctcggccgcgaccggcgcgccagaanngagcggccgcccgggcaggtgaagaacaatggcttcctctatgctctcttccgctactatggttgcctctccggctcaggccactatggtcgctcctttcaacggacttaagtcctccgctgccttcccagccacccgcaaggctaacaacgacattacttccatcacaagcaacggcggaagagttaactgcatgcaggtgtggcctccgattggaaagaagaagtttgagactctctcttaccttcctgaccttaccgattccgaattggctaaggaagttgactaccttatccgcaacaagtggattccttgtgttgaattcgagttggagcacggatttgtgtaccgtgagcacggtaactcacccggatactatgatggacggtactggacaatgtggaagcttcccttgttcggttgcaccgactccgctcaagtgttgaaggaagtggaagagtgcaagaaggagtaccccaatgccttcattaggatcatcggattcgacaacacccgtcaagtccagtgcatcagtttcattgcctacaagccaccaagcttcaccggttaatttccctttgcttttgtgtaaacctcaaaactttatcccccatctttgattttatcccttgtttttctgcttttttcttctttcttgggttttaatttccggacttaacgtttgttttccggtttgcgagacatattctatcggattctcaactgtctgatgaaataaatatgtaatgttctataagtctttcaatttgatatgcatatcaacaaaaaaaaaaaaaaa

SEQ ID NO: 42 - DNA, 1203 bp, Arabidopsis thaliana
  misc_feature (1)...(1203): n = A,T,C or G
tttttaaagaaaatttagggcgtagtaataattaaatgctgattttaaaaatatctggtttttggaccaaagctagttattagctggattccaacagaagatgaaggaaaaaaacatcggtacgtacttcaaattttattgtacgattcacaaagcctaataagaaatctaacagggagtcttaattagcatcagaaacagagctttatattctaaaaccgcacatcatccggttgatatctttcatataaagttttatctaacgacgtcgttctggtgaccaatgcggcaacgaagggctgaaatgagcagacacaactctagagtcaagcagctccatgataggtgtgaagctcacgcacctcggtaccttatactgattaatcgatgcgcctctcgagatggcatagtccatgagctcctcaaacgtaccgttncgtaccacacgtatctnnnnnnnnnnnatcgatttannngcgacnnggctttgtctataaaccgagtttaaagattcctccatctccaaacagcacttagccatgacttcttcgctcataagagcattgctttgatctctaccaagtagctcccagtagattacgtaatgacccggtatagtcttcgtttctgcgtagcttgtgtactcgatcacacgtgttccttgctctgcaaacaacctcgacgcattctccactgctttttgtagctcagcctcgtcggttttatcggattctacgcttagcagaacattctttctccgtatgaatttgaactgtggagcggaattatggaaccccgtgacacgaagaatgtcgccaactctgtaccggcagagccccgcgtaggtcgtgatcacgagttcgtactcttttcctacctcaacattagcaagctccacaagtgacgtttcgtctaatgatgcttctgctgctccatctccatcgtgattatgtgggaggaattcaaagtaggccatgtttggcatgattgtgtaagaaacctccgagggtttacacatcggctttaggttaatcccgaagtaactttcggacgaagcatacatcgtgcaagccatcggtaatcaaccgctatagtactccaacgtcgggatatactgagccattgctccagtaacaatcacgtcgaggtacttcgtgttaggccatatctttgtgattatcacctgcccgggcggccgctcga

SEQ ID NO: 43 - DNA, 1200 bp, Arabidopsis thaliana
  misc_feature (1)...(1200): n = A,T,C or G
ctttttttttttttttgaacacaaacattttgtattgatttttatgtaaaactaaccaacaaacaaagaacgtatctctaccagaaccaaagatctttgccttaaaggttcagcataaatcttgacacagagagactctaatagtagtagtagtattagatatatgattccaaatttgagattattactagtgtattgttgatttagctgcatattggacaacgaacaagaccattctcattacactccttacacttcaccaccactgcatcattcccccatccttccaccactttacagcttccattacaacccgaacacggcaaaaacgctaatccgccgcaaccaccgcaaccgccgccacaccgatctttcttcctcggaatctctttaagcaattcaccaagcaatccttcttccaccaatctcatcacttcctctgctccaccaatgtacttccccttcacaaaaacccgaggcggcaacaccgccgccgtcgattctaccgccattagattggataactcttctctaaatcctctatccattgacacatctctctcacaaaccactacaccaaaactctcaatcgcagctctcacggcgttacacgnnncaaacgtccgtcgaacaccgcgcaacgacgtcgtataaatcacaacgcgattctctccgccgtcacataacctctcagattcctccgctaatttcggatctaacggtttcaaaacctcgtaatcgttagggtttttcaaattaggatcggagttctctttctttaatccgccggaaaatccattacatttcaccggaatcggagagaatcgacaagtatcgccgtctaaacctgacattagctcccagaagttaataacctccgtcgtcggctcagacttaaccatcatcatcgccgcctccttaccgttgatagtgaatctctcaggcggagtcattggcgtgataacggatttggcggaggaggaggaggaaggagacggaggagaaggtgaagaagagtcgagattgagaagaccgtaagtggtggaagttagcttgacgaaatgttggcttaaggaggagctggtgaggtgagagaagctgctgtcatcggtcggagtaaggaggttggaggagacgcaaccacccatcgccggagatttcgaggattaagcaacgtcggagaaaaaatcggacgcgtgg

SEQ ID NO: 44 - DNA, 1198 bp, Arabidopsis thaliana
ttttttttttttttttttttgtctctaccattttttttcttatgtctttattaccattaaatgttaagcccatgaaatcaagacaaacaattaaaaccaacacgttaaaaagaaaaaacagagagaacagaacaaagagcagagagttttaagttaaaagcaacatacattcattaatcctcaccaaaccctaatgttattagaggaaagagagatagagaaagagagagagagagagagaggtctttcgtgattttaaatcgtctgtagctgggagaaggagattctgataattgatccgcctagagaagtcgcgtgcttgcataccaatgcttccgcagcttcctcctcgttctcaaactgtaccagagcttgctttttcccgttcatctcaaacacttttgtgttcactactgcaccgtgttcttggacatggttcatcacttcctcctctgtcacgtcttgaggaagagtcgataagtgaatcatctttgtaggggagcagcaatagcggtaattctttgcagcattgcggttgaagcggttcaggttagagtttacataatcatgagagtctgtgcctggtgttatatttggatgctttgagaagtttacttctaaccgcttaccaaacagcattgctcccttgaggaaatgtactgcaagttcagcttggaaaccatcgcccatttggacaagggcatggtcaggtttgttccgaagaagcttaatccttacaatgttcccgtaaagagaaaatagattgaatagcttatcttcatcaatactatctgcattcaggttagagacaaggactgtacacctatcatttgtgccggttatacccggaggcaagcctcctccaaaggcagctgcaatcgctgatgtgtttgccatctgaggatatgccactcctgtatcaccatagccaggatgcgatgaacggcctttttgttctgcaggcaggtttggatttgtataatccctagatcgatcattgttgtaatttacttgcagctcctcaaggtttgagaactggatatccaactgacaacacccgtcatatatgttacgaccctgtagagcagttctagcagaggcagcacactgttgtacctgatactgtataagagcttgaaaaccagcagacttctggaaagtgacgagcttctcgacaaatccatagggagaaaaaact

SEQ ID NO: 45 - DNA, 1195 bp, Arabidopsis thaliana
tttttttttttttttaaaataaaaccatccttttttaagtcaacccaaaaaagtaagaagtcaaaacagaaacaatcatatcgagcaaaaaaagtctaaaacagcaaatagattcccgcaaaaatttgtcaatcagagagagagatagagaggaagagagtcaaagtaaaaaaaaaaactcgaacaaaagcttctcataaatgatcattgatggaaagtgaagccaagagatcacttggacttccacttttgttgccttcacttccctgtgaagatggctgattcacgtttctcaacacatctaatgcctctgaaactttggcatttagagcctctggtgactcgagcagatgcaaaacctcggtctgatccatttccagaagcataccagtcactttcgcagcgtgctcactctctatctggtccactaatggatatagactctcaccaagaagtgttctctgttgagcaggtgtagcattagcaagggaagtagccaattgaccagcggacataggctgactatacggcattacattcatgtcataagcaactggaaccattcctcctggcattggaccgtcaggcatgtttctaccaccagaagggtaccggtaccctcgtcctcttggcatcatctgtggctgcatgtaaggcattggctgctgatgctgatggcgcatgggtccatcacctgaccgtctgccacctggtcgtggaccttgctgacctggctgcatcatcggtccaccaaaaaaggccggcctcattccaggaaccagctgaggctgatatccaaatccaggctggtgagggatgattggtggaggtccttgaccgtaaaaaatctgttgtccaagacctggagcaccacctgtaaatattggcattcgaggacccacaccggggataaaagcaggtctcatttgagaaaactgtgcctgcagcttagccctcctttcttctttcctctgtgcaagagcaacatacaacggtttgccaccaaccattttaccattcatttcattcagcactcttgaagcttcactggcagcagagaaggcaacaaatcctgatcctttgctagtaccactagggtcccgcataaccttgcaagaggtgattgtaccaaattcggcaaacaactcgcgcaacttctcatcggtgacggtatcatcaaggttcttaacatata

SEQ ID NO: 46 - DNA, 1195 bp, Arabidopsis thaliana
  misc_feature (1)...(1195): n = A,T,C or G
attcatttgttttactgtttttgataacctcaaaatttgcctaaattttattctctataaatccttatatgttttacttacattcctaaagttttcaactttcttgagcttcaaaaagtacctccaatggcttcttctgcatttgcttttccttcttacataataaccaaaggaggactttcaactgattcttgtaaatcaacttctttgtcttcttctagatctttggttacagatcttccatcaccatgtctgaaacccaacaacaattcccattcaaacagaagagcaaaagtgtgtgcttcacttgcagagaagggtgaatattattcaaacagaccaccaactccattacttgacactattaactacccaatccacatgaaaaatctttctgtcaaggaactgaaacaactttctgatgagctgagatcagacgtgatctttaatgtgtcgaaaaccggtggacatntggggtcaagtcttggtgttgtggnncttactgtggctcttcattacattttcaatactccacaagacaagattctttgggatgttggtcatcagtcttatcctcataagattcttactgggagaagaggaaagatgcctacaatgaggcaaaccaatggtctctctggtttcaccaaacgaggagagagtgaacatgattgctttggtactggacacagctcaaccacaatatctgctggtttaggaatggcggtaggaagggatttgaaggggaagaacaacaatgtggttgctgtgattggtgatggtgcgatgacggcaggacaggcttatgaagccatgaacaacgccggatatctagactctgatatgattgtgattcttaatgacaacaagcaagtctcattacctacagctactttggatggaccaagtccacctgttggtgcattgagcagtgctcttagtcggttacagtctaacccggctctcagagagttgagagaagtcgcaaagggtatgacaaagcaaataggcggaccaatgcatcagttggcggctaaggtagatgagtatgctcgaggaatgataagcgggactggatcgtcactgtttgaagaactcggtctttactatattggtccagttgatgggcacaacatagatgatttggtagccattcttaaagaagttaagagtacctgcccgggcggccgctcga

SEQ ID NO: 47 - DNA, 1191 bp, Arabidopsis thaliana
  misc_feature (1)...(1191): n = A,T,C or G
ctttttttttttttttttttttaaggcgcagaagaagaatattcattcctggtgtagatatattcttcgacgttgctgagatagctaactgtaccgcccacctccaccgtccaaacccgccctgcccgaagtatagtagctgcataagccagagcgctctattaagcccaacgcctggtagcatcatcgaggcctatatcttcagctgtgaaaggcggccatctagcttcccaaggaaccaatcaaagtaacgactgcatgagtatcgctaaccgagcacctcaacagagagttcctccccttcctccaagctttgagcttccaaagcatgtatttgtgctttaaggagcacaacgagcctcttgtaggcatcgagaaagtatgggtcagggccaatggcgaggggttccaggctgcaactcatttcatatgtagctttctgaatgacgacactgggaatcaggccagctgtggattgtttatcgtcgtgaagtgtatcccagatagcgcgacaggttttctgctggatactgcgaaattctttgtctgccttgtcaaccaaggtcgataattcatcgtcgttgataccatgcaatggcactgtcagatgtgtggtttcgaccaactctgtcatacctgggccnnannnaggtgccctatgccgatagtgttcggtgccaaacgtggaaataaagtgaaggatcatgatacgtttgaggtattcggctacctctgcttgatcgttttcatccnnncgtttcaaagctcnnnncattgtgtagagnnnnnnnnatcggggcccgtgcacaaagttcttttcctcatccgtaggctcttcttttgttgcgacgctgagaggttttcgggctagttgcgggtcaccgacgagcttttcgtacttgtagcataatagccgagcttcaatatggtcctggaagagataggtcaagcccaatccaagggcgccaaccgttgctaggcctgcagcccatttaagagttgtcttccgtgaattctctccagtggaatgcgtcggagtggggttgcgtgcagtaaggcacctcctggcgactacgacgactggctgaggcgttagaggagtaccagttaccctgggcgctgcccaagacctgagtaatgctggacgaaagatgcctcgagagcttgtcgacagacgagcaagcattccag

SEQ ID NO: 48 - DNA, 1191 bp, Arabidopsis thaliana
ttttttttttttaaaataagtctcacatagagaccgtaattaacgtattaattgtccccactaagattttatatataagtaccaattacgacaaatatcttaatcaacttggtccaacaccaaaacacatcggaaacgtcctttgcgttaacccaaaacttcaaaagtagtaataaagaaaataaaacaataactctcttttaggattagaaattattctaattacatagaatagatccctttttctatgctcttcccgcaatttccatcaacgaactatagccatacgacgtcgttgagcctccgttggcactttcacatcggtcgctaaaccgataatttcgaaaaaccgaacaatgtaccacgaaatgtctatttgccaccattcaagtccttgtctagccgatgactcgaacgcatgatgattgttgtgccaactctctccaaatgaaaataccgataaccaccaaacattacgagaagtgtcattggtcttccaagttcgagtgccccaaatatggcagagtgaatttatgaggcaagtcacgtgcacttccaatgctgctcctacccccattccccaagtaacgaaggacatgccaccaaggtagaagagaaagaaacccaatcctaaaatgtgaaatagcactgttttctgaagaaacctataaaaccattgcctcttcaaatcctccacgtttgctcttcttccacactttgaaacaagataggcagagtcatagatccaaagaagatgactaaaccaaaaaccttccttaggactatgtggatcacgttctgaatccgtgaactggtgatggtaacgatgtgtactcacccaatcaatcggatctccctgaatagcgagaagggcacaataggctaagagatactcaagccatttagggactttgaaactccggtgagccaagttgcgatgataagagacggtgataccaagaccaccgatggtgtaaaacaaaaacgtaacccaaagagccgaccaagtgaaataaaacggagccaagagagcaagagaatgaacagtgaaagaagctgagaatttcacataatctaatctcctccaccttctatcccaaaacacccatctcctcttcttcttctcctcctccaccgccgccggcgttgatggatttttctggtggttctcctccaccgttgatgtcaccg

SEQ ID NO: 49 - DNA, 1189 bp, Arabidopsis thaliana
  misc_feature (1)...(1189): n = A,T,C or G
tttttttttttttttttttttttttcagcacagtaagaaactttactttggtcttcatgtatgtatcaactacagagtttgatcccaaacaaatctgattttccttgtagaatagaaacatatttcatggaaaatctcagttcatcaaaggcccaaaaaagaacaagtgctaaagctgaaccactacctttaggcgattaagctgctgcaagtggctggagagctttaagagggttcatgataacaccgtcgataagtccatactcttttgcttctttggcactcatgaagaaatcacggtctgtgtcctggtttatcttctccaggctttgaccagtgtggtatgcgaggtaaccgtttaggtttgccttgtgatgcagcatttcatttgcctgaatgtcaatgtcggtttggccaccttgagctccaccaagcggctgatggatcattatccttgagtttggtagactgtatctttttcctttnnnnccagcactaagcagaaaagctcccatactagcagctagaccaacacaaacagtnnncacatcaggccnnatgtgcctcatagtatcgaatatagccatgccagctgtaactgatccaccaggagaattaacatacatgacaatatccttagtaggatcaacagcatcaagatacaggagttgagctacaattatgtttgccatatcgtcatccacagcaccaccacagcgaataatcctatattggaagagctgactaatgatactctggaaacgttcttgcaccataggaggtggtccttgtccttgagcataagcaggaaaatacggcgaagaagggacttgtaaatcatctctaatggaccaaactccttgaggagacggaatctccggtgtccagagattgccggaatatacagctttcggagttgaattcttccaattctttctatcgctaactaacttattcgtcttccttgaacggagaggctcgaaaggaagagaaagcttgggagaatcgaaagaggagccattgggactagcggagacgaatccagctgtgaatctgagagaagaagccgatgtagagacgcaagcatgagccattttcttgttatcaatttggggatgaatgaaaccctagttccgttcaccggcgatgagcttccggctcttatccttgttgaaaatcggacgcgtgg

SEQ ID NO: 50 - DNA, 1181 bp, Arabidopsis thaliana
cttttttttttttttttttgaaaaaccaataatatcttctcatcgtcaaaatgaacattcaaacattaataaacgaaaagaaaataggttgaattggataaaagaaaaaaaaattaggagataagacaacttatattttcccattaccagctctagttaaacgcaccacaatcacgacggatgtttccattgctgctattcttaactccaacacggccaagtttggtcatggctatcacaaaagcgcggttaaaggccgtagagtttgaggcccaagcattaacggtgggcctagagcgaccatccgtgaagagaacttgatcggaggtgaagagacctttgccttgttgaagattcttgaagtaagtgttgtcaaacgtcttgggcgtgactgggtccatgttgattgcaattcttgggtccacattcttaggacaagccttttgaagctcaatagcgtaagccttgtttaaagttgggtccacggagttgatgccgttgaatttgtggattcttttaaagaccttgccgcaatgtgcgaatccaagggtgtgagccgctgaaagagcaatcatatcttcttgggtaagtttgtttttcgtgaaaagagcattaagtttgtctacattgtccgaaggtcctggtaagttcccttcgacacttgacgcggttgataccaaaccatcgaacctaccaagttcaacttcataggacggtcctccagccgcaacaacaacatctcgggtggccaaagtaagaatatcggcacatgagaccttgttccggcaactagggttagagtcaagggctttcttagcttggatcaccacatcaaatccatctccagctagcgaaatgttatctggatgatccttctctgccttgttcttaggcgttgattggatcatgacagatgcatcacaaccattgacaaagcagtcgtggaagaagagacggagagtggcagggacggcgacgaatgtcttctttattttcttttggacagcatttctcacgatttgttcgacattggggcaagttttggagtagaaaccgcggcttagttgtgcggtggttgtatcgggaaagacagagattatgaggcaaagacctatgagtagaacaatatcgaagcgagccattgtttggacaaaaccgagagagagagagtgttgtatata

SEQ ID NO: 51 - DNA, 1179 bp, Arabidopsis thaliana
  misc_feature (1)...(1179): n = A,T,C or G
tttgagttgcaacttttatttctaaataggttcttcttgatgaataatttttacattacaacaaaaataaactcacattaagagaagaaaagaaaaaaagaggaagcaaagctttattgcaagaaatgtttcacaagaaaacagagtgtatagtggttatctagactggaagttgagagtcttgatgcaaaatgcgaagatgaaggcaaaaaagacagtgaagccaactagtactccggccacaggtcccatgtagtctgattcaaaaccatattgatctttaatgtactgtttaacagtgaggccaggtgcaccaccaaggagagcgatgggagtctcaacgtcaccgtattgagaagtgatcaaaccgtatatggtccaagcaacagggcagatccagtaataccaaacccaccactttggaattttgggtctagggatgaaaaatccagagaagaggttaaagataccataaaaggctgatgcaaagatagaagctacttgttggttaggtgtgagggaaactgtcatcatgccgtagtaggtccagtagaggaaggagaagtaattgatgaagataaaccacaagaacttggaagctttccactcgaatccaaccatagagtagatgatangnnnntagtacgtggtctgaatcaagacataaggtagttcacaagtcacctgggagatagcataaggtatagctgagtacatcccagcagctttttctctgtagaacactgttctttccactgccaccattggttgtactgttgagcagttgtttataccaacgaatacaactgctgcgtagattgctccgatcaccatcgttagatcttgtacgtttgatctcttacctccgatttgccagaagacagagccgatcatgagagatgttgccaatgtgaagatgaacctgacaaggttgtagtcaggagatctccaataagtccaccactgcttccatagacatgatttgaattgtccccatgtgttctgtgaaaactgtgtggcaaagtagagatcagtcgctccttggggaggcacgcttagttcttgcaccagcgccttgttccgctggcataaggctgaagccttatatagctcagcaaagtcaactccaagctttaactcggccgcaagggagctagcttccagcatccaagtggccgg

SEQ ID NO: 52 - DNA, 1179 bp, Arabidopsis thaliana
tggagtgtcacaaggtatgtacctaaaggagaccactgcacataactctctgtccaataaggacgcttatgaacaggttcaggcgccttctgcctagtatcattccagaaaacttcagtatcagggccagaacgaatgactagctggtctcgggctttttcatcagtaagccatttttgcaaattttccccagggacgtagggcctggcctgaggaggctcccactcctccttcacattcatcaacctgtcaaaatcatcgaacatgtttacagcaaagatgtgagacttgtccaacttgtagccatgagacttttccgcgacggtggatgatctgctggcgatgcaagcctgcaatctcatgtgtcttcctgagaactaccagatgaagtactacctctaccatatcctctcatggcctcagcttctctacgtcgccgaggactacaatggtcgcatcgttggctatgtcttggctaagatggaggaagagagcaacgagtgccacggccacatcacttctctcgccgttcttcgtacccatcgcaagctcggtctcgccactaagctcatgaccgccgctcaagctgccatggaacaggtttacgaggctgagtatgtttcgttgcatgtgaggagaagtaaccgagcagcattcaatctatacactgagacattaggctacaagattaatgatgtagaagcaaagtactacgccgatggggaggatgcttatgacatgcggaagaatctcaaggggaagcagaaccatcaccacgcccacggtcatcatcatcaccatggaggaggatgttgttctggtgatgcaaaagttgtagaaacagctcaagccgtagatggtaaagcagtttccaaatgagattcgaaagcagataattatgagtatattgaggtgggttcactggctcgctctagtacttctcactatttccattcatatgattccgagtgacaaatacatttggtgaccactctgtgttactcctttgtctttctttggttgtattgaaaatttagccgttcctttttttgatgtatcattttggaaattccaagctttcattaaggctttacaacttaagctggaaatcttctatttgcaagatagcagatctctattggcaatatagtacatttaattacaagaaaaaaaaaaaaa

SEQ ID NO: 53 - DNA, 1177 bp, Arabidopsis thaliana
  misc_feature (1)...(1177): n = A,T,C or G
cttttttttttttttttaataagtagatatataaatatcatatgcatcaaataacacatacattgcttgtacgttacaaattgttacacacaaacctcccccacaaagccacaaataagacacagtaaatgtcactcaccgaccatcttaaataatattcgttttttcttttatatgatttgggtcccttttttttttccttcctcccttcctggcccaaagaattcttcacctcttcgctagttcgaaataacaaatttaagcatggagctcatgaagctggctcctgactgacccataggccttcattgcaccagctctcaacacaaactgatggtaaaatgctgcaatggctgcacccacaaatggaccgacccagaagatccactgatcatcccaagccttttgattgttgtagatgacggcagctccaaaactcctagccgggtttattccggtgccagtaattggaattgtggctaaatgaaccatgaacacggaaaatccaattggcaatggtgctaatacaggaatgtgagagtcacgggcatttcgcttagggtcggtagcggagaagacggtgtagacgaggacaaaagtgccgataatctcagcaccaaccccaacgccaacattgtatccgtcggagagcatgttggctccaccaccgtagcggttgtaataagtcgactggaagactttcaccannncaactccacaagtggctccgagacactgagccaccatgtacgacacagctctaaccaatgataccttgctagctaggaatagcccaaacgtcaccgcgggattgatgtgtccaccagagatgccggcagtgcagtagacgaggatgaatatcatgccaccaaaggcccaagagatgcctaggaggccgacactggcacaagctccgccgccggcgttgatatcagtctggctcttaaagccgatgactgtcaaaacagtcacgtatagaaagagcaaagtagctatgaactcagcgatgacagctctgtagaaggaccacnncttgagctctctcacctcgaacgtcttcacaggcggtgggtctaagtagtccttgccggagagcgactcttcctccgtcaactcatccttcgtcattctttcagacttagccttcacggactcaaaaaagaaagagaggcggccg

SEQ ID NO: 54 - DNA, 1177 bp, Arabidopsis thaliana
tttttttttttttttttttttttttaagaagtccaataaaaagacggctctattcaaaagtctgatccatcagttatcaaaaagcacacaaaacaagtctttctttttttttaattttaaatagacatttcaagatcggagatttagtaactatgaccattctgtctctgcagcactttgtttccttattcctcatcgtcgtcatcatcatcttccttcttcagacgggtctctccaccttccttgataataggaagcttcatagctccaaatggtgtatcaacatcaatattacctttgattgtgtaccctgttcctttaccacgaatcatatcccaaagcgcagaaccaaagtcctttggtcggaatgtcatcggcacattaatcaatccgcttccgtttttgtcaagcttgatcgagtccgcgatctctgctttcccaatgcttacatcacacagccaaacttcacagtccaagtcattgagccccaagtcgaaatcattcatgttctgaagcctcacatggagaatcgccacggtttcctccaaagagaacttctggaacttaatcttctcgatatcaacatcaggtttctttggaattgggatctctccacatttctccagcggcaatgtcagtcttcccaatactggcacatccacaatcagatcaaccttgattctgtaaggtatgatcatcccggggttgatatcgttgtaagtgctcttgatgtcatcatagatcaacgtcaatggtatcttcacagtttcttctccatgagccttgagtgttccagcatccgggatcaaaccagaaaccagtttcctcccatcgctctcgaccaggtagttgacatcgatgagagggataggaactggattcgggttcttgacaagcacatccacaacaatatctgccctctcaagattgatcttagggatatgaatcgcagagacatcagcagttggcttcccaaagccaatggttccctcgagtttctcaccaatgtcatgaatgaaatctttcaccttatcgaggaatccacctttcccttcttctttttcctcgtccttatccttctgacttctatcgacgatttccacgtcaccctcctgatgaactactctactgatgatttccggtttatcctcagatgtcgacatgcctcctggattgg

SEQ ID NO: 55 - DNA, 1174 bp, Arabidopsis thaliana
caccgatgaagcaacaacttgtgtaggccttgttatccgcaacagaaaatctggaatgacgtctgttgcacacatggattcgccagagattgtggatttggggataagccagatgttgttattggttttacaggatgacgtagatgccgagttagatgtacatatggttggtggttatgaagatgtcgacataaaagtttgtctctagattttctatttctcagtcgacttagttctaagctgtagagaggtctttagctgaatgtcttgaccgttatgtgcagaatgctgatggtgttggtgactatgccaaaccagagggttattcatttccgttgtgttgcaaattagtagaaactttgcagaagagaagagaaaactttcacattcaaaccctctttattcttgggcacaataccaagttggattcacaagcaaacacgtgccccatttttaatggatgcctggtgaataccagcaccggtgcaatcttgccagccagtttcaacagaacatctagatgtccggatgagatcgttagaagaattcgagtttcatcatcgtttgaagattctagctggaagggaaagttacttgacacatatgacacaaaaactgatagattcatcatcgcaccatgccgctggacaatgcgcttgattgaatatgtttgggaacttaatcagcttactgatgaagaaatcctcactaactgttccacctcaccttctgctgaaggtccagacttcgtaaacagtttaagaaggttagtcattttggaagcttccactggatcattatctagaacacaaacaggacataggaaaatttgcattctctttctttttgtgtgttttaggaattggggatatttactgaaatatccagaatggagcaaaacattcccaaggaggcaaccacgtgtgtttgaaagaactgtcgatggacactggaaaaaatgctgactttctcatctaatcatcatgacattatccagaaatctggctaaaaacaacggttagtgtatctaacattttgagatttatgtaaatggtcaagaacacatgtgattgattcttggacacagaaaatgtttgatttatctttttgactttttgtatcaaaaaaaaagaaaaaaaaaaaaaaagggcggccgactagttctagatcgcga

SEQ ID NO: 56 - DNA, 1168 bp, Arabidopsis thaliana
  misc_feature (1)...(1168): n = A,T,C or G
tttttttttaaacaaagaaagaactttaaacacaaggaataaaaatagatgaacaaatgcacgtttagacaacgaaggtagtaactaaaatagaatccatggttttagactaaaccatgcttaaactctgtttgttctggaaacaatcttgcttaggattcagtggcgtgaataagaatcaacctagattacttcatcactcaaatttgctctgaacatcttgaatgatggtgatacaatcagactcgcttacatggatcactcagtttgctctgagatatgcaaagactatggccagtagaatcacaaccattataataaagacactgtttggttgtcctttgtcattaacataagattttctgttttgaagaactccagcgtctctgcagagtttctgaacggcttcaagtcggtttagtgtcttactggcatttggatcgnncttgtcaacctttgtcttcagcatgcaggaaaaatcatagaaagcaccatagacatcagccattgtctttgtacgatcaatgactttagcagtaagacctcgcctcagtttcacaacgcctctgaatacttgttcanngttatagcataatgcaagtgttccaatcgccatgatctgagggatggcacagaaccgaaatatggaaggatcacgcaaggaaaccatgtatttcaggcaatcttcaatatgcatcaacgcattggtaaccatttcatttaagcactgtacggatttgtttgtgttctcctcgtattttaaatcctcaagcttgtcagcatatttgccccaaatctcgcgaggccaaaacatgcgggattttggtatctcattaatgtcctcaagataatctctgataatgtttgttttctgtagaaataaacccattgaattggaaatcgcctcccaatctggtgtcaaaacctctgatcctgcagcgaggaagagtttcgacaaacctaaaccaacaagcccagcaacatagtggcagtattcatcgtagtcatcaacagtttctacctcttggcagataaacttggccatccctgcacccattcttctagtaatttcctcgatagcctcttgataccctttttcaagttccaaaaaagctgcagaaacatggtgaaattggtccattagaatcttgtactcccggacgcgtgg

SEQ ID NO: 57 - DNA, 1168 bp, Arabidopsis thaliana
actataaaatttattgcattgagtcttacaagcaggctttagaatttagtgtaacctgaaactgtacgagccaaacttctaaataacatcccacgagattccgaaaacatttagagaaaaagtgaacacataccatttcgcagcgagattccgtgtgtacgagatagagatagagaaaaacctgagatgttaatctcattgtcctaagcttaatgctcttaaccctcaccagcctctcactgattctaaaaactctcaaaataaagagttattcccaattcaattaccccaacatacacaaatacatgaaaacgccttctctaccaaacgctagctcctttatttttacgatactggcgccatgtctttacctttggttgcggctgttgcagctgctgcggcggcggcggctgcagctgcggcagctgctgcggctgctgatgatgctgagctaggggttgatggaggaaccgggttgctttgctttgtaaccacttcttgacgcttttgcagcagtggagagttgagatcggtaagcaattctttaatctgcttaccggacagagtttcgtgctgaagcaaagcatttgcaagggcatgaagctctttgttgtaaaccgtgaggattgtttttgcattgttataagccttttccagaagttgtttcacttcactctcaatgagaagccttgtctcggtgctcatgcttttcccattgtcgtcgtagttatgtgccacaagacccacctctttgctcataccgaatttcgtgaccattgctctcgcgagtttggttgcctgctcaagatcagaagatgcacccgaagttacttcactttccccaaaaatcaactcttcggctacccggcctcccatacaaacatcaagcctagcaagcatctgtttcctagaaatgctcgtctcatctttatctggtagttgagaaaccatgccaagagccataccacgaggcacaatggttgctttgtggactggaagagcaccttcggtgtgaatggcaacaagggcatgaccaccttcatggaaagcagttagctttcttgactcgtcagatataactgcagatttcctctcacttcccatcatgattctgtctttggcaaactcaagatcagacattgtcacatctttagaaccgtccattgca

SEQ ID NO: 58 - DNA, 1167 bp, Arabidopsis thaliana
cgcccgggcaggtaccggagctatgtctttcctctacaacatcatccctctcccagttgtacgcggcgtccagctttctcaaggtcttcagttcgccttcaccgccatcaaatacgtcaggtttaattacgatactgccactctcaaaccctcttcttctcctcgtatttggcttggcctcgacggccttatcttggctctagctgctctgctcttcatcattttgtccaccggctctggcaacgacagagaagctgaagatggagatctcgccgagacttccagcaacgaaagccagtctcgccggaggagactgcgtcttctgtcttcgattccatctgcgctgatcgtgttcgcactcgggttagtgctctgtttcatacgtgatccatccattttcaaagaccttaaattcggtccctcgaagttccacattctgagaatcagttgggatgattggaaaatcgggtttctgagggcggcgattcctcagattccactctctgtactgaactcagtgatcgcagtttgtaaattatccaatgacttgtttgacaaggaactctctgcgactacagtctccatcagcgttggggtgatgaacttaatagggtgctggtttggcgctatgcccgtctgtcacggtgctggtgggttagctggtcagtatcggtttggggcaaggagtggattatccgttatttttctcggaatcgggaaactgattgtgggtctggtgtttggaaactcctttgtaaggattctgagtcagtttccgattggaattttaggggttctgttgctattcgcgggaatcgaactggcaatggcttccaaagacatgaactccaaagaagattccttcatcatgctggtctgcgccgctgtgtcgatgactggctcgagtgccgccttaggatttggttgtggagttgttctttacttgttactgaagctaagaacgttagactgttcttcagtaactctgttttcccggtcaagtgatgagtcgcaggtcgattccgaagccgctcctcgtgatgtctaagatggacttgccaaaatgacttgatggagaagtacttatgacgaaatggcgggcagctgcgagtgcatcttatgtcttcgattccatctgcggtcataggggttggtgccctgtttcat

SEQ ID NO: 59 - DNA, 1167 bp, Arabidopsis thaliana
tttttttttttttgggaagaacaaagcttgattcatatttgtgataaacgcaaaatatagattcgattcaaacaaaaaggtgcaaaacatctaagggtcttaagagaaacaagtgagaagaaaaaacagttacggttcgataactcttcaatcccaaaagtaacaaaaaagcatgtctataaccattaaaccattgagtaaaggctatcaactttactcccaaccagcagctggtgcccctgagggtggcgcggcagcttcccatccaccatctgccggtgcagcagcggaatcactccaagaagcagcagcaggtgcagcagagattggtgcctgaccttctcctggccatgcagcatcagggatctgagcggtggtccattggtctccacctaccattccatattctggagcaggaagtgcaccatattctgcctgagggccagcttcatcttcatcctctggcttagtctcctcaggttccctgtaaaagaacaggtcaaccatgacatcccacttctgtccagcagcaatggttccacgcatctgaaggaccatgcgagccagaagccagaaaaggcacccaatgctgtgctttcccttgttgttggctgggataccaatgtcaacaaatctcattggagagtctgtgtcacagaaagcaatgattggaatgtttcccaaagcaccttccttgataggctggtggtcagttcttgggtcagtaagaatcaacagccttggttcactgaaggatgtctgcatctgattggtgaaggtaccaggagtgtgtcttccagcaatggcattggctccagtgtactgagcaaacttcaacacagctctctgtccatagggcctagctgactggacgatgatgtcctgtgggttctcaatggcaacaataactctagcagccatctggagcttttcccatgttttgccaaggttgaagatgtaaataccatcgttgcgtctcttgaagacgtaacgctccatctggtaattgcaattcttggttccaagatgaacctcagcggcacacatcatcctgacatcagcttccttctgagagagctgcgctgagctagcagatccattagtcgccattttcttatctctcttcttcttcttcgccgggaactaatcgccgcgataagctttttt

SEQ ID NO: 60 - DNA, 1166 bp, Arabidopsis thaliana
  misc_feature (1)...(1166): n = A,T,C or G
tagagagatgatcatcagatcaaatatctgaccggtccttcctttagtacaactttccagaatctncgagatcatgannttgtncnnatgactcaatgacagtcgcaacacgtaacgtatgaatgaccgcaaaagaaagatgccaaaaaaaccactacatttaacagagcacttgctaagaggggtcatgtttagaaaatgttactggtctattaagtagccttttgaagttgtaccagaaactgagcattacgatgatctgttacgggtaaaaaagggaaaatcattactctctcaatcttcttgttccttactttaatgatgtatgtgcagtgcaaaagccctaaggattccactgatgtggctgttttttttataacctttggctgaagtacatgttcatgaaatatcttgacgggttgaatccgcttaagataagaataggagacaggacaatgacaactccgattgggtagaggaagaatgttgttcgctccaaaaatggaagcacgtcatatcctaggaagttaagataatggtagtacgaagccccgaccatgaaaagcagattcgatagcagtaaagggatgaatccgtgtgctatcaggagcggtgataagaagtaatgtacgacgtagagcagcacaaacattggaaagaacgagnngcagtgaacatcaaatgtatacagccattcaacgcgttgttccaccacatgactgtttggagtctcctcgcgaaggtaagaatttgtcaaaaaccaacagcatgtagctataactgctccggtgattaagaaatgggtgaacaaaactgaaacgactacgacgacggcatgagagctactatggtcatacgtgacacaataggctacagttgcaacaacaagaagcaggctacagatcacaataaacgcagggtcatcacgtgcccattggttcttagtttgtttgtgatacttagtgtgttgatagacaactttcggagatgtacaaaggttaagcatttgccagaaagtatattcaacatccatttgctgccacttaacgatacgacgaaagtactgaaggaacattggattagctcgggatgaagaagatgaagaacgagatctggaagttgtgggcaacatcttctcctcccttgtttctgatccagattttgat

SEQ ID NO: 61 - DNA, 1164 bp, Arabidopsis thaliana
  misc_feature (1)...(1164): n = A,T,C or G
tgattcatattagctcagactgtatgaaacacaaacctcgtgatacaagactgattaagagaatcagcaacgcagaaatacttgataaatcccacaaaacacaaatggtgaacacacacgaagtaaatacgaaacccgaggaactatatcgacacacacaaagagaaacggttgttaatagagaagaagagttaccattttctttacaaattgtacgtcgaactttccctttttgccaacattgttgttgaatatcagcttcaccagtgtgtataatgagaatcaagagcggcatgatgggtttttacgttcgcaatgattctttatcatagaaggcaagaagctgtttgacatggttttgccaagctgcaacactttgaccatctacagtgacccaatccacaactgttgatgcaggttgttcccaccattcatcaagcaaacccctaacgtatttgcagtgttccgaggaagcttgcgcattctgaactgcagtcctaagttcaggtaaccactggtccgatattgtattctcttgttcagaagctagatctaggcagtagttagttgttctttcatatttttgctgggcacggaaagcatgatctaacagagaatggccactttcaactagatcctgccgaatatggaccaaatcgattgcctttgctaagtcttctaaaacacatgcttcagaaccacgaactcttaagcagaactcaagagactctaacactgaggccaaacttgcatctgaaccctcaagacctgcaggatattgaagggcagcagaaatgcgacatatagatggtattgccgatggatctcttgcaccagctctagccgttaatagagcagcattcttctctgcatatgcaacagcttcaggtcccgtcgatccattagctcccatagattccagaagtccctggggagttgctggaagcatataaagactgttatcaggactttgaaagaaagcagacacttctttctcaatgaaatcttttgcgctgtttgaaatgtccacaacaacttcactggctggaattacagtggctgatgcatattcccttgcagcnnntggttgttgattccagaatgcaacagcatccatgttggccttgagaagagttgtatatatggtttcaagttcggatctgc

SEQ ID NO: 62 - DNA, 1163 bp, Arabidopsis thaliana
cggagaaaatttggccctaaatcactttcccgggaaaatcaaactctggggaaagagttgaaacaatgtcacaaggcgatacagtaccgcttcatccatcgtctcaatcagacattgacgagatcgagaatctgattaacgaaagcgtccaatcaggtcccggaaccgttctcgccgctcgtccaccgagcccaaccagaccttcgattccagtatcttcttcttcttcttcttctccgtttatgcaatcgaatcttccaccgcttcatccgtcgtcatcagctcagaaagtgacacatgtccccgttcctccgcctcttccggcggtaagtaactccagcaatttccaaggagcgagtgcttttggatctccgcctaatacgttgacggagcctgtgtgggatactgtgaagcgagatctgtctcggatcgtgagtaatttgaagcttgtggtgtttcctaatccgtatagggaagatcctgggaaggctcttagagattgggatctttggggtccgtttttcttcattgtgttcttgggtcttactctttcatggtcagcttccgtcaagaagtccgaggtatttgcagtggcatttgcactattagcagccggggcggtgatccttacactaaacgtgcttctcctgggtggacatataatcttcttccaaagcttgagccttctaggttactgtttatttccgctagacgttggagccgtgatctgcatgttgaaagacaatgtgatactgaagatggtggttgtgtctgtaacccttgcctggagctcatgggctgcttacccttttatgagctcagcggttaacccaagaagaaaagcactcgctctataccccgtcttcctcatgtatgtgtcagtcggttttctcatcatagccatcaattgaatccccaattttgagaagaaaaagggaatcatcacaggtattctcaggaatcagcttggatagaaatttttcatacatacacaaaccatcctgagttctgatgatcatgtataaacatgttttgttacccttttttgtgggtttggttaaaaagaagatcatcatttgtatgtgccccgctctatctgcattaagcttacatttatctttttggccataaatacaatttttttaccaaaaaaaaaaaaaaag

SEQ ID NO: 63 - DNA, 1162 bp, Arabidopsis thaliana
  misc_feature (1)...(1162): n = A,T,C or G
attgatgtgagcaagattgacatgacaaccaccgtcttggggttcaagatctcgatgcccatcatggttgctccaactgccatgcaaaagatggctcaccctgatggggaatatgctactgctagagctgcatctgcagctggaactatcatgacactatcttcatgggctacttccagcgttgaagaagttgcctctacagggccagggatccgattcttccagccctatgtatacaagaacaggaatgtggttgagcagctcgtgagaagagctgagagggctgggttcaaagccattgctctcactgtagacaccccaaggctaggccgcagagagtctgatatcaagaacagattcactttgcctccaaacctgacattgaagaactttgaaggacttgacctcggaaagatggacgaggccaatgactctggcttggcttcatatgttgctggtcaaattgaccgtaccttaagctggaaggatgtccagtggctccagacaatcaccaagttgcccattcttgtcaaaggtgttcttacaggagaggatgcaaggatagcgattcaagctggtgcagccggaatcattgtatcaaaccatggagctcgccagcttgactatgtcccagcaaccatctcggcccttgaagaggttgtcaaagcgacacaaggacgaattcctgtcttcttggatggtggtgttcgacgtggcactgatgtcttcaaagcacttgcacttggagcctccgggatatttattggaagaccagtggtattctcattggcagctgaaggagaggctggagttagaaaggtgcttcaaatgctacgtgatgagttcgagctgaccatggcactgagtgggtgtcggtccctaaaggaaatctcccgtaaccacattaccaccgaatgggacactccacgtccttcagccaggttatagagaggaaaataacnnncaagcagagaacagcagcaacacagaaccaaaatattggctaaacttattcatactctgattgtacttggcttctactctgctaaatatctcaagacttgtttctccctctatcagatcacaaaccaagcctagtgattctgtaatactatttggctacttctttcttaaggccattcttatttctaaattccatgta

SEQ ID NO: 64 - DNA, 1161 bp, Arabidopsis thaliana
  misc_feature (1)...(1161): n = A,T,C or G
cttttttttttttttttatgtgagagatatagtaactacaactgaatgaaaaatccatgagacaaaaaagttcgcaatagaagaatattgattcggtaacaaagcacagcttataagttttcttgtgttaaagatgaaccaatttgaagcattagaggataaactggactaaactctttgtcccctctcgatctgatcttcactgcataatcatccaaagttgcttttatccctttccagatctgatcctctctttggttatcaagccacagtgagtactgtttaggacttagtctgttcttctgcatcggtgactctaactcgtctgggcctcttgtgtagagatgatgtaggacgatgctcggtggtagatcattgatgagaggagatgatcccatttgagatgtttccaggaaaaccaaaggcctaaacgctctaagagctctgtacggtgctccgagttgttccacgggaaatagattctgtcccactgctagttccagctcggccatgtctttggccattctgagttttccccattctgaaagtggtcgcacnngggatgcatgtctgatgtagaagatcaaaacccttgacgccatttgtcttgtgagtcttgtgcagatcgattctgttcctgcagtgttagcatttgctgcnnnannnnntagtctagataggaactnnnngcggaagtgaagaatcgatctctgcaactcctccatgtatgaggaagcgttgttgtccatgtcagcgtcatcagcaccaaagttttgatcatggatttgaagaatgcatgactcgagcttgtctcgcattgctttaaacaaaggtgtaactggctcacatgccgcatcatagattgcagccagataaggagacaatacatcagtagcaatactgggaaggtccgctaccatggatgagatatgtgtgtggattccttgcagatgctgacataatgtgaagttcctgatctgtgttgaagtcgcaggacctgatatctgccgcgtctcagggcctgtagaaatctggcactcagctcgttgagctaggttactaagggccttgcctatctcacgcaaaactagaagagtcaaacgagcatctggatgaacagcctcaatctcatcttgaatgtgtgataatacctgtgaaatc

SEQ ID NO: 65 - DNA, 1161 bp, Arabidopsis thaliana
  misc_feature (1)...(1161): n = A,T,C or G
tttttttttttttttttttttttaaatgaacactattttttttatttttttttaatgaaagttgaattggtacttaaacaaactcacaccacatagaactcacaaaggggttacattgtcaccttacactcattttcttgtgcggccagaaacttattcttctttggtttctttaaccgtattgggacgtctctgtgcaagtgttctcttagtgctctcgaggacaccaaagaagattgatcctccaatacctatccacaacactcttggcccaataccctttaagagagcaggagctccttcctctcttacaattgtttgaacacagtcaacgattccttgatattgtttggctgatccctgaaccattaatcttgtcttaataacatcaagcggagtggtgactgctccggtcagagcaccagcaaatgcaccgattagagcgttctcaggatcactaagctctctacgcgcggcttttttataccccaagcaaagctgctcatatatgcagaactgtatagcatcaaatggcaaatctcgcaaaaggaaggaccggtatcctgcatagagacccctaaatccctcttttgatgcaatcattcgaacagcactgggagctgatgtaaactgtnnngnctgcatnctttgcttnnnnnnnnctgtaggcactcgaatcagagatgcagcaagtccaccgatggcccctgcagtcaggtgagcaactgcgcttaaatgatcaggaaaggtcttcagcagtttctgctttgtgggttcgtaaactccaacaaataaagccgaagccggtaagacaccagcgatatttccagctaatcctgaataaagacccttcaaaacaatttttccacctccacgagctgcctgaagtctagtcttaatagtatcaattgggtataaagctgtttcaactacaactccagctgtacctcctgctataaacccctcaaagagagtgcggaagaaatcaaagggttaatcttcttgtgtattaacagatgcaaaaaagcctttgtttattttgagctgtggactctgcattaccctcttcgaaacatcatgagaggtcgctgaagagctcttcacatcaacggagagagtaagaggagccatgagaaacgcctctgacaggaagagaagcgc

SEQ ID NO: 66 - DNA, 1159 bp, Arabidopsis thaliana
caagagggagaaagtgctcgccgacgctggttacatggacgctcagcagcaaccttgatatggggaggtggcaaagaagagtaatcattatctgctttttcattgaaatgtaattttgtttcatttgttgttgttctctttcgttgtttcaagttgttcaactccatacactgccaatcgtccattgtggattttgtatcaaaaggcaaacaaagcatatttattacatatgaattttccccttatcagaacaatggtttcttactggtcacaagcgattgtacaaatcgaaaagcctaaagatgaaatgacaaaagaaaacaatgatttgtaacaaaaagatcaatcaatagcatcatcatgcatctatgcaaaatcagaggagatcagaaagtatgctgtagaactacacgtattcgattcaccaatctaactaccattaagagtatttactcttatgcctcgggtttagaagacagagttgtagtagtatttatactgaccgaatcgggagatgcaagagaaaaaggcgccactgtggacctcagagattcaggtccctcagaattaattctcttacataatgtatcgcagttgctgatcacctctgtcaatcttcctttaagctccccgagctccacctgcaaaccatgaacttgagataaatgctgggcagttgtcctcattgcagaaacagagtggttaaacctctgtaaaagtttagtcgccaaagcatctgcgacttctatcttgttttctatatcttcctgtctcttggtaatttcttgagctttgttctcttgccattctcggtaaatggagaagagctctacaagtatttgaggatcaaccgtattggaagaggaactggatagagcttttctcactaagatatctgttaagctactttccgtgggaggagacttcaatattggcctacttactgtgagagctttaagattctcgagaatgggatcgactatttctgatcgatgagatatagtcgtaatcacatcacctcgattttcctgagagcctagcagagttgaatctgatgctcccatttgcttcacagactccgattagggaattttattcaaggaatcagcagttccgttttgggagaaatctggaaacgctcgtagcaaggttcggacgc

SEQ ID NO: 67 - DNA, 1156 bp, Arabidopsis thaliana
  misc_feature (1)...(1156): n = A,T,C or G
cggccgcccaaacttcactactgaattactgtgaaaatatgttacatctaaatgttaagaatctctgggtcataaatttttctaccaaaaaaataagaaagaaaagacttttaaatagaagaaagggaatcagagaggtaggtggctctcggatcagatcatctctgaggctgatcagatgcagaggctccaacggaaggtgcagttggtgcaccgctagccgacccgttctcagccggtggagcgactccccatttaccttcagactcgagcggttcgaatatgtgcactcccccgtctgagagaccaactgcaaacatgtttggttcttgcggatgtgcagcaatcactagtggatgtacgtttgaattgctgagactagctggtagatacgcagaagggttgacccggcaacgcagccgtagatttgcagagctaaatacacaaactgttgcatccataaaactcgcgtagaccaattggctatcgcatgagaatgtggcatgagtgattggagctaatgattctcgaacagcccactgtttcatgcattcgagcttggtagtttcgtatatagcaagttgcgtctcgtgcacaacgaggaagtgagcntgatcttgatggaactgaacacgcgtatctgaaggtgcactgttnnnncttccctgtnnnantnnnnaaaccttgcttctctgcttttcccatccatctgtgttccaaacacaaagctgtgcatctgctccagacgaaaccaacacgtttaatacgttggagaaggcaagaccagttattctctttgaatgacctttaagcttactcttcacctcatcaacacggacattataaatctgaatcgtgctatcatccatcccaatagcgatgatattgttgtcttgaggatgaaaagcaagaaaagtagcagccggtggtgggggcatgaaagtcgccattgtcnnaaacgtcatcatgttaaataaggatatctttcctccggaggctgacattacatatgaatcattcttggataaagcaaaacaaggtacagcttcctcgggattggtttcagcaacatcgttagtcatgaggatcccactagctggttgccactgctgaggcggtaaagaagctgtcgcctttccagttgcgttgcgctcat

SEQ ID NO: 68 - DNA, 1153 bp, Arabidopsis thaliana
  misc_feature (1)...(1153): n = A,T,C or G
cttttttttttttttttttttttagataaagcgaacttgagattttatcttaaagcaacattaattaaaaccacatttacaattacacgaatgggaaattccatgaaatgaaagagagaacaaaaaaacagaaacatataaagaagatcacatgtaacttccacttaattcatttgtaatcatccttttaattttgatcaaagatttataacttgtggtttaatttaaaataaatgtatattaagcaaagctcctaaaggagccaaaggagccaaatgagccaagagctttaatcgcagccgctcttaaaataaactgatggtaaaacgctgctgctgctgctccgatcatcggtccaacccaaaaaatccattggtcgtcccaggccttttcgttgttgtaaataacggcagctccaaagctacgagccgggttgataccggttccggtgatgggaatggtggctaaatgaaccatgaagacggcaaagccaatgggaagtggagccaaaactggcacgtgagagtcacgagcatttcgcttgggatcggttgccgagaagacggtgtatacaaggacaaaagttccaatgatctcggcaccgagtccggtacctttgttgtagccatcggctagctcgttggctccacctccatatctggtgtagtaagaactttggaatgctttgacgaaaccgcaaccgcagatggcaccaaggcactgagccacaatgtataacantgtccgcaccaatgacactttacgagccaggaatagtcccaccgtcacagccggatttatatgaccaccggagataccggcggtacagtaaacgagaacaaagatcattccaccgaaagcccacgcaatacccaatattcctacgccgccacaatccactcctccggcggttgcatcggtttgagctttgtagccgattacagtcaggattgagacgtagaggaacagaagtgttgctacaaactcagctatgaccgctctataaagcggccatttcctaagctcctccatgtcgaaaaatggtgcgggaggcggatccttgtagtctctcgccgccggtggtccactctcgttcacatccaagtcttttgccatggccaaagatgatgagagagatgagttttaatgttcg

SEQ ID NO: 69 - DNA, 1150 bp, Arabidopsis thaliana
ctttttttttttttttttttttttttttttttgttaaaacacatgaaaaatgtggtttgatattataacaaaccgagacgctcgttttagctcatctgtggcactgataaacaactttcactacatcaccaaagcagtacatcttcctaaaataaaaggcatcaaattgcttcagagaaacgtaaatcagcagggcctggtcccagtattcctttttgttcaacaatcttccctagtccttgtgatggatcttctgctggtgcacttgcgtcagtgatcaccgtgataactggcaattctctctcatcatgattattggagctttcaaaaggtattggggtcgttagaggaggttcgatatctgggtcaggcttctgaaatatgaatgttgcatacagacctaacaaatcaaatgctcttggaagaagttttcccctagggtcaacgaaattcgggccagcattcatcagcaagcttgcaaactgggctctgttatcatcataaaaatctgttaaactttgaatttccacaaattcaaggccagcttccctcgctaacctgattaagcttgggaagtgaaccaagcaatggtcttcagaagcattgtcaccagaaaatttcagctggtacctctttccaaacagcggaaatttttcttcctccaattcgaaagtgatcatgtaactttcagaccgaatgtagtttggaaatacattaggctttgcaccgcttctgttgtggtatgcttcaacatttttctggtactttgcccaaatcgtagacgagtcaggagtgataccgaaaaaataaccccctggtttcagtaaacatgctacattagttaggagtcttctcgcactctcctcagtttcaaagcataactggagatggcgccaacaagaaactaaatcagcctgctccaatttcttctgtagctggatttcaaaatcatccttggaaggatcagcttcaaagaattccacatcgtaattcttcctctgactctcccaagcttctcgtacagaagaaatcccagaagatgtatcaattccgatgtagtgaccaatcggagcagcttcccacttgtcggtttcgggagctccgccacagtacaattcgcaaacagtggcataaggatgtgcgaagatgt

SEQ ID NO: 70 - DNA, 1150 bp, Arabidopsis thaliana
tttttttttttttttttttagattggaacaaacttcctttattaaaatagagcacaagaagaacaaagaaaaaacaacatcgcaagagacaacgcgtaaaacacttatcaaagatcaccattcaccagaggcatgaagagacctcatatgagaaatttagaagatagatttgataacttattagatgcatggaatcaaggataaagagctccatcatcagttggataaaggacgaacatggactccaattttgtggagcagaacatcggctcttccatggaaaccaacgatcttgtggccttcctctttgagttcgaagactgtgccagcttcaagtccaaagggaggagacgtttgcttattagtcttgaacctgagcatagttatgactgagccatcactcccaaagattttatcataagtgccatcgactgcggtgatgtattcacttggatagtcaagtacgaactcttcgaatccgagtagagtactctttccatgttcttctcctgtgacctcctcagggcttttgtcgtacacaaacttaacagctgagattccatcttgggcttgtccaacgtacaccttcttaaccccaacgtaagcaccatcatcccatacagttccgtcatcactaccaaatgccgttagctgcttggcaggagtcaacggagttgtagtagtcaacggagcaaagtaagccccaagagaattaagattgcccccggcagacccatgaaagccaatgatcttcttgtctttaacttgtagagtgaagtgagtaccctcatcggatccaatgacatcagaagtcttcttgttggagatgaacttaattccttgaatgataccttcagggctataccaaccttctacagaaactagatgttcgtctggatggttaatcacaaacggatcagctgggagaacacggcctttggtaccacgaagaggagcttgttcgggttgtccgttcttgacataatcaaactgaacatattgaattccgtctatgcctgctgcgagctgaatcttggtcacggcgtcatgtgtcgatccatcgtcccataggttggctcctttccctccttgtgcttccaccttttgggccatcttctgcttcttgatagtacttacgaatttcttttaa

SEQ ID NO: 71 - DNA, 1148 bp, Arabidopsis thaliana
ggccgcccgggcaggtaaaagaaaaaaaagctattgtttgaaagaagaagaagttaactatggcaaaggatgtggaagccgttcccggagaaggatttcagacaagagactatcaagatccgccaccagctccgtttattgatggagcggagctaaagaagtggtctttctacagagcagttatcgccgagttcgtagccactctcctcttcttatacatcaccgttttgacagtcatcggttacaagattcagtccgatactgatgccggtggcgtagattgcggcggagttggaatcctcggtatcgcttgggcctttggtggtatgatcttcatcctcgtctactgcaccgccggtatctctggtggtcacattaacccagcggtgacatttgggctattcttggcacgtaaagtgtcgttacctagggccctattgtacataatcgctcagtgtttgggtgcgatttgtggagttggttttgtcaaagccttccaaagctcttactacacccgttacggaggtggagccaactctctagccgatggctacagcacagggaccggtctagccgcagagatcattggtactttcgttcttgtctacaccgtcttctctgccactgaccccaaacgtagtgccagagactcccacgttccggtgttggcgccacttccaatcggatttgccgtgttcatggtacatttggctaccattcccattaccggaaccggaattaacccggcaaggagtttcggagctgccgtaatctacaacaagagcaagccatgggatgaccactggatattttgggttggaccattcattggagctgcgatagctgcattctaccaccaattcgttctgagagcttcaggttctaagtctcttggatcattcagaagtgctgccaacgtctaaacacatcaaaccagatttctcaagaataaatgaagttgtgatctctctgtacaaatctaaatcagtcacttgcagttttcatttccctttcttatatttgtgttttccacttgctcttttgtgaattttccttcggtgtaattgttttttctttcgcttttaaacgagtgattggaattataatcaatgaaatcaaagaggttcttaaaaaaaaaaaaaaaaaaa

SEQ ID NO: 72 - DNA, 1145 bp, Arabidopsis thaliana
  misc_feature (1)...(1145): n = A,T,C or G
gaccaacaaaaacataacaggagacactgagtatctgattatgatataaacagagaaagagagtaatagggcattgagataatgaaatgggtaaatgattgtttcacaccaaagaaatatgtacaaaaaccatgacctgaagagaagtaccaaacacattcacacaccagacatccatgtttttcgaccccaaagaagctactcttgttcttatcgtcatcatcaaagtaattcacctttttgttttgatttaacggtcgttttgggcgctggctcggatgaatgaatcccgccgctgtcccccgacaaatgcttgttttagtcgagagattggccccatcaatcttccagctttctcgtttccaatgcttgattcccacttttgctgcaaaatctgccacctctcctgttgccaatgttggccaagaatcacaattcccattacagctgcagctatgcagatggaccaaactgtattagtttctttcgcttggnnaatcaaagaggcaacgcttcttttccaccaagcnnctnnnnnnngtggcgagtttgctacctcatcatctttaataggattcagatcaagtgtaacatcagaaggagaaacaggctcggtcggnncttcaacaggttcatacacgtgtgagccaccgatagctctttcatcgtccagagaactcatagctgtcgtgtaaatgttttcttctttcttgcctttatcctcggaaaactcaagtcctccgaaatcatctgataaatccaaccctttcagactcaaatcactcccttccttgcaatgagaccccgttaagctagcctcggtaaggtcactagtattctcaagctgaccagttggtgggaaaacaaagtggcgagacatgtataagggatgagatgtctcagcttcgtaacaaggagtaacttccttgtgatcatcatctttcgagtccactactggtttaggaccaggagcagcagcgtaagctgaagcagtaagagaaacaacttcccaatcatttccacgcgtcgctgcttcatctttgtcagccattgtcacagtcaacaagtgaaggagatgagagatctgttgcgataagatcaaaataatggaggagatgagaagacaaagtatgtgccgacgaaga

SEQ ID NO: 73 - DNA, 1145 bp, Arabidopsis thaliana
  misc_feature (1)...(1145): n = A,T,C or G
ctatccgattcgtctctctcacgccctcacgtttctccacctcatcctcaaactaaccacaagacctcttttttagagtaaccaatcacagagagatagagagagagaacagagtcaatgtcaatggcgtctatagcttcttcttcttccaccaccctactctcttcctctagggttcttcttccttcaaagtcttctcttttatctcctaccgtctctgtccccagaaccctacactcttcctcggcatcatcctcttctctctgttccgggttctccagtctcggttccctcaccaccagccgctccgcctcacgccggaacttcgccgtcaaggctcaggctgatgatttaccactggtcggtaataaggcgcctgattttgaagcagaggcagtttttgatcaagagttcataaaggtgaagctctctgagtacattggcaaaaagtatgttattctattcttctaccctttggacttcacttttgtctgccccactgagattactgccttnantnnccgttatgaagaatttgagaagctaaacaccgaagtattaggngtctctgtcgacagtgtgttctcgcatctcgcgtgggtccanncagacagaaagtcgggagggctcggtgatctgaattatcctcttgtttcggatatcactaaatccantnnnaaatcgtttggagtgctcatccctgatcagggcattgcactgagagggcttttcatcatagacaaggaaggagtcattcagcattccaccatcaacaacctcggtattggccgaagtgttgatgagacaatgagaaccctccaggcattacagtatgttcaagaaaacccggatgaagtgnnnctgcgggatggaagccaggggagaaatcaatgaaacctgaccccaagctcagcaaagaatacttttcagctatctagaggctaagattgaacacatgtttggtgaaaattagcaatcagagttgttttattcatcttttcaaagttggagcagagttgttatttttagccaaagaacctttgtatctatctcatctttctcctgtttctgctatgtgattctccttaaattgaatcaaaaataaagaaatccttcttttctaaaaaaaaaaaaaaaaaaaaaaa

SEQ ID NO: 74 - DNA, 1144 bp, Arabidopsis thaliana
  misc_feature (1)...(1144): n = A,T,C or G
ttttgtcgtcaatttcaacacttttaagaattaaaaagtctcattttctttttattcctttttttaaaaaattcctttatttttcggataattaaatgattctctaagcttcatagcaatgaaacactttgaattcgcatttcggcgatatagtctctaataacaacctcgccgtgtgctcttgcctcaccaccgcatcttctttctccaccagaaccgctccgacgatcctctcgtatcctcctccaccaccattagccacataatcaaccaacgccgcctgtactggtcccatactaggattatacgccgccgattccatataccaacctctgtacactttcccgtcacaatccaccagcgaaactcccgatggacataaactatacggcgcgtacgatctattcgccgccgctaaagccgtttgtttcaaatcggcggatgaatcggtatttccgttacaaatcgaatccagatctgagattttgagatggttatcgtgagattcgagaagaagaggatgatctttcccgagnagatcgtcgggaccgaatctgtgtggcaagaagcttccgagacgtaagaatccgtctgaatcggcggcggaatcggaatcggcggagttgtttggatcggtgataaggattttgatttcaggtgcgtcgcgaatttcttggaggaattgacggcaatggccacatggtgcggcggagacggcgaagaaattgagatgacgttcaccgttgagtgtgagattggtgacgaggaactgttcggcgtggattgagtggtggagagggagatttgggaattcgacattgacgcctaagaagatccgacctgatgatccgagtccgacgactgcgacgttgaatttcgaaatcggagttcgagcgtaggattgtgctggtttgactagcgacgggaggagctgaatgacggaaacgccgagttgtttcgcggcggattctgcttctttggattggattacgaagcttggcttatccattgcgggttgatccggtttgggtcgcgtaaatgggtcgggttatttttagatgggagagatccgggaaatgaggaattatgaaatggaagctcgagaaacaaactatttatagatacaacaacgtaggaaactaca

SEQ ID NO: 75 - DNA, 1143 bp, Arabidopsis thaliana
  misc_feature (1)...(1143): n = A,T,C or G
gttttggtatttcttcttattgaatccaaaacattgacagacattcatacacatatatattattattannncttttccacaatatatatcctttatgcaaggaccatcaatattagttcacataacgacaatccttcctgatctccccttggtctcccgtgagcgggttggtctcggacaagagcctgacgccacgtgagaactgctcatggaagtaattattgtccgcagccatcttggccacaaacggtgcggtcctgggatcggtggctagctcatcatcaatgacaagaagccccttatgggccatgatgttcttataatacatgttgtccacaaccatcggagtctcacgatcgttacgggagtacaagacggcgttcgggtccggtgttggacttgggcaacgtttttttaagtaaagggcgtaacttgggtcgagagtagggtcaatcgttgggtatagccggtgcactaggttaacgcagtggaccctacccactgagtgagcacctaagagagcgacggtggcttcgacatcgatgccaatggagttaaaggtggagataacagatgagagagagtcattgtggttagggattagagtctcaacatctcccaagtagctccctctactatctctccttcctgtctttatcatctctatctttggccctttcaacatgacaataccgtctctcgcagaaagagcgacaatatcagcacaagagactgtggaaggacactctttctcgagtgcgtctttgataatcttaacgtacttaaagtttctcataccgaaactcctcttcgatttctgctcagattccacacctctcgctgtctctagcagcagcgacgcatcacacgacttgacgacacagtcatggaagagattacggagccaagatacggctgtgttaccgtgtttgtagtaaagcgtctccacttgttgtcttattatctcttccgcttttggacaactctctttgtaatagttcatctccaattccccatttccgatatggaagatggagaataactgtaataacagacaaaagaagccgaggagacaaaagggcttcgcattggccattgctctctctctattctctcttatcttttgtctaatacctgcccggg

SEQ ID NO: 76 - DNA, 1143 bp, Arabidopsis thaliana
ctttttttttttttttttttttttttttctattctctctctctctcgcctctataaaaccattctttctctatctcagccactctcattacccattgtagaaaagaagaaaaaaagcaaagaacacttgaacgttttctagatagagatggaagggaaagaagaggatgttcgagtgggagctaacaagttcccggagaggcaaccgataggtacatcggctcagacggacaaagactacaaggagccaccaccagctccatttttcgagccaggcgagctgagttcgtggtccttctacagagccggaatcgccgagttcatagccaccttcctgtttctatacataacagtattgacagtgatgggagtgaagagagcaccaaacatgtgtgcctctgttggaatccaaggcattgcttgggctttcggtggcatgatctttgcccttgtctactgtactgctggaatctctggtgggcacataaacccagcggtgacatttggtctgttcttggctcgtaagctgtcattgacgagagctgtcttttacatcgtgatgcaatgtctcggagccatctgcggcgccggagttgtcaaaggcttccagccaaatccttaccaaactctcggcggaggagccaacacagtcgctcacggctacactaagggctctggtttgggtgctgagataatcggaaccttcgtccttgtctacacggtcttctccgccactgacgccaagagaagcgctcgtgactcccacgttccgattttggcaccactcccaatcggattcgctgtgttcttggttcacttggcgacgattccaatcaccggaacaggaattaacccagctaggagtcttggagctgcaatcatctacaacaaggaccacgcttgggacgaccactggatattctgggtcggaccattcattggagcagctcttgcggctctttaccaccaacttgtcatcagagccattccattcaagtccagatcctgatttgatttctttctttataaaacttcattgttgcatcttggtttgtaattgagcttgaaaatatttgagagatctggatcatgtgtttattttaattaatggacttgtctttttcttaaaaaaaaaaaaaaaaaa

SEQ ID NO: 77 - DNA, 1142 bp, Arabidopsis thaliana
tttttttttttttttttttttttttttatcaaattagattgaagattaaggtcataaccccaaaagggtattgtttaaatgtgaaagtcatacatggaaaagggcattgtttaaatgtgaaaatcatacatggagaattataagaagaacaaggactgggaataaataatccagaggagattccagagacttttcaatattgcaaaagatagcaataaacaaacacacaaacacactcctctgcacaaatccgttttgtttcatccatcgttgtacctgactgtgaagagggtgaacctgatgagatactaaggcactttactcatctttgatgtgttcatgatgatcggaagcagcagcagcaatcttagcctcatgatcttcatcatcatcatcgtcatcatccctacgtgatttaacagtgacaatagcttccctggtagctccaacattcccaggaggagcaggaccatcacgatcatcaggatatctaacaacaacaacaggacaaacacaatggtgaacacaataatcactaacagagccaagcttgccatcacttcctctcttctcagcaccaaatcctctgcttcccattatcacggcgcttagattaagcctttcagtctctaagcaaagcctctctctcatatcgtgatctttcactatatggatcttatgaggaaacccagcttccttcaacggcttcgctagatccgctactttggaagaagtaaacgcatcgaaatcttcctgactaggcttcggctgagctccgggatcggtagcggcggaaggaggaggaggagtttggagagggagaggtccccaatcggcgccgaagagaacggaggttggagaaacgtggagaatgacgacggcgtctccgggacggatgtaatgatcgacagcccagcgaacagcgaaagcgctttcttcggaaaggtcaacggcgactccgatcttacggcgagcaccggcggttggggtaggagtagcggcggaaggagtggaggaagagtggtggtgagagtgacgaggagatgaaggatggtggatcttgatgttagggagatgaggataatcggaatctggattcatgatcgtcttcttcttcttctctgctttgattcaacaatttc

SEQ ID NO: 78 - DNA, 1137 bp, Arabidopsis thaliana
cttttttttttttttttttttttttttttttttttttaatttaacttggactaacaggttttatttgaaatttgtctttatttggaaccttttatgggataatctcccaattattcacataaatctcagcatataaaatcatcactcaaccgccgtaccgtctctcgcggcagagaatgtgatcggaaattttggttgtttattaggaaaaaacaaaccaaaattcttctcgatctcaggactcttttgattctcatcaaacatagcgaacaaatacgtttccactactcttccaggtctcttcggtgttcctctgttctctctcacacgcgacgcaagattcgtgtaaaaagctcgcgcgttatcgaaactcgcggcgtttccaccgttagaaggccatccgctctcggaaacaaccactgggagagatccaccgcctgagcgttcaacggcagagtaaacaacgtcaagtaaagcgtcaaagaggttttggtagccacgagagccgtcccatacgacgacggaaggagaagtgaagagagcgtaagagagagatatgtcacgtggattgtcaacgtagctgaagtaaggatagatgttggctagtaacgctgagttcgtactcgtaagaaacccgatgacgggatcgatataccatctaacgtcaccacgaaactctccggaggaaggagggaaagagtttccaatcaaagtcatatcaatggcggtagaaactttaatacgatcttgaagatttgcacctcttagagcatcgtaaacgttacgcatggcagggagcacaacatcaccgccgttcgacggagatacttcgttacctacggcgatgtacttgaagctaacggcggggtaatagttgaggacgttgttttggagccatgatctagcggaagaagggttagtgagtgaacgaagatcggtgtttggaacgccgatgatgacttcgatacccgtgtttctaagagcgtttaaagcggcttggtttggatcgtagagtctaacacgtcggatgttgttttgtctaaagagagcgattgtgtctgattgagaaggaaggttgttccccatcattccatagcatacacctactgattctccacttgttgggttgaggatggt

SEQ ID NO: 79 - DNA, 1135 bp, Arabidopsis thaliana
  misc_feature (1)...(1135): n = A,T,C or G
tttttttttttttttacacgctatggcgtttttaaatagtaatgataagtttattacaaaacgtctcaagtctctctcaatagggtctgatgatcatatacatacatacaaagacatagtcaacgaacttaaacaacagacgaatttatagttctctaaaaccatcaccagaaacacacttttaggttttatcatcttacccaagcaacagcatcaatctcatctcttgctttcttgtataactctagcctcttcgcgcactctagtctccggtccatcaatgccggatcttcatctagtaactgtcccaactgtttcccctctctcttgctgatctgagagtagaagtaattgagcaatgcgagcttggcttgtctaacctgacagtacacacaagcttttggaatggtgttacgnnngtgtccgaaaccatattaacatacgcagatacatttgatgctatccttctgaaatgtccgtctccatactggtctaatgttgcagacgaaggagaagcggtttggtttttgctgttnnnnactggtctttctatttnnngaggaagtnnccggaagaactcagctgttagatacgcagattccatgtcaacaagtcgaataaccgacttcttgctttcttccctgaatttctccaaggagctgttggctgctgcagcaagctcgacttgcagtgaagggaaacgctttagctcctcagtttctgatattgatttcctcacaagctctttcaagacatagtgaacagcatccacagaagcttcagctggacctctaaagtaacccagtgccccttcgattagacggcgataaccctgttctggtgcaatcaagtgaggttgataaccatctgcctcggacacgattttcttcacgctttgtagagaaagatggcgatcaaaaggaagctttttaagtgcagctggaagttggttatcaaagactccatagatacggtcacctccaggacgcccgccatcaagatgttccttgaatatcttatcgaatgcacggcacatctccaatatagtgtatagttgagccccagcatcaactgcgacaggccgacccattcggtctaactctctttcaagttcttcaatgcttttgtttattaa

SEQ ID NO: 80 - DNA, 1132 bp, Arabidopsis thaliana
  misc_feature (1)...(1132): n = A,T,C or G
ccacgcgtccggatgtggagagagtagggaagaaaaacagaggagctaataacaattatttctacgaggagtcttctggtgaaactcattggacttcatggctgattccggcgattgtagtggcaaatctcgctgtctttatcgctgttatgttcgttaatgattgtcctaagaaaatcaccggacctaacaaagagtgtgttgctagattcctcggaagattctcgtttcaaccacttaaagagaatcctctctttggtccttcttcttcaacattggagaaaatgggagcattggaatggaggaaagtagtacatgaacatcaaggatggagacttctctcttgtatgtggcttcacgctggtatcattcatcttcttacaaacatgttgagtttgatcttcattggtatccgccttgagcagcaatttggcttcataagagtcgggctgatatacttaatatcgggtctcggtggaagcatactttcgtcgcttttccttcaagaaagtatctccgttggtgcttcgggtgctctctttggacttcttggagcaatgttatctgaacttcttaccaattggactatctatgccaacaaggcggctgctctgatcacacttctgttcatcatcgcaatcaacttagcattaggcatgcttcctcgggttgacaactttgcacacattggaggctttttaaccggattctgcctcgggtttgtcctccttgtccgacctcagtacggttgggaagcttcccgcaccagcacttcgcgaaccaaacgaaagtatagcatataccagtacgtgctattcgtagttgcagtggttctacttgtggttgggttaactgttgcattagtgatgcttttcaaaggagagaatgggaacaaacattgcaaatggtgtcattaccttagctgtttcccaacttctaaatggacctgctaatcatcatcatcatcatcataatcatatagtaaaagctnntatatgtgttcatgttaacatttaatctctttgatctctctagcctttgattacttatatatgtgtacattacaaaattcgtcttgtgtaaaaggggatagaaataaaagagtgtataatttggtttatagtacacactt

SEQ ID NO: 81 - DNA, 1132 bp, Arabidopsis thaliana
attgggccaatctgtatatgcgacaaaaatacattttgaaaatgtacgacgagtaggtatagtaaataaggagaagcccaatttaatgtcatgggccaaacatgtaaataaaccaaacaagcaaaagcccaaagtcgattcagtatcatcatagctctgtttttacataagttacaaatagaatctcacatgataatgattttaagatgaggagaaggtatcgatgatggtggtgtggagtggatcactgaggtgagtagcccaattgttgagtggacctttacctgttgcagccgcttgaaccgcgaatcccaagaaggcgaccatcgcaagacgtgcatgcttgatctcagctaactgaagttgagcagtcttctccgggtcagccgctaaacctagcgggtcaaagaacttgcctccggggtataaacgcttctccgaatcaagctcggcgttgcgctggaactcgatgtagccgatcactaacacctcgatccatatcaatgtcgagatcgagaaaggtaatggctgccccaagtaggacgatccatctacaagctccaccttgccagcgtcttgccatgtaacgccggtaagccattcgacggagagagcgccgagagtagcgagcatcgcccaccgtccgtggatgagttcgcattccctgaatctctggattccgaacacctcactgtacggctgaaacggcgtcgatttggcgtcggcagcttccgtacgggttccgatcacgtctccggccaagttcttagccagattctggtctagtgaatcgatatcgaattgaagatactcggccggtttgcctaaaccgaagggatcaaaaccgtaatctccaaccaaggaaccatcaagccagtcaggagaaatggcgcctgggtaccaaagaggccggtccgtagtcaccgtctttttggcactctttttgggagctgccttcttctttccgaaaccgaacacggctgtgaaccgacctgaaccgggatggataccgggagccacccgagtacccatgatggaagaagcagctgcagcagcggcggatgttgcggccatctccggctaattgggttttgtgatattcagaagatagagaagaaagacggacgcgtgg

SEQ ID NO: 82 - DNA, 1129 bp, Arabidopsis thaliana
  misc_feature (1)...(1129): n = A,T,C or G
gggcaggttgcctatattgagtggtcgaggattcatggagattgaagaccaaggactcagtagcagcttcttccctttcttagtggttnnnnngacgatgtttgttctgaaatccgtatacttgaaaccacattagagttcactggaactgattctgctaagcaagctatggatttcatacatgaaatcggttgncntcttcacagaagtaaacnnngggaatcagacccaaatccaggcgttttcccattaatacgcttccagtggctaatcgagttctcaatggatcgagagtggtgcgctgtgatcagaaagctattaaacatgttctttgatggagctgttggtgaattttcttcctcctctaatgccacactgtcagaactgtgccttcttcacagagccgtgaggaaaaactctaagcctatggttgaaatgctcttgagatatattcccaagcaacaaagaaacagcttgtttagacccgatgctgctggtccagccggcttaacacctcttcatattgcagctggtaaagacggttcagaagatgtgttggatgcgctaacagaagatcctgcaatggtggggattgaagcgtggaagacatgtcgagacagcacaggcttcacaccagaagactacgcacgcttacgcggtcacttctcatacatccacttgattcaacgcaagatcaataaaaagtcaacaactgaagatcatgttgtggtcaacatcccagtttctttctcagacagagagcagaaagaaccaaaatcaggtccgatggcttcagccttggagatcacacagattccatgcaagctctgtgaccataaactggtgtatgggacaacacgcaggtctgtagcgtacagaccagctatgttgtcaatggtggcgattgctgcggtttgcgtctgtgtggcacttctgtttaagagttgcccggaagtgctctatgtgtttcaaccgttcaggtgggagttattggactatggaacaagctgagtgtaagtctactttgaaagatcttctaagatatatatatgaatgttacttatataaaacccatagaggtgtgatttctatatgtaactatatgagtataagatatagagacatgttg

SEQ ID NO: 83 - DNA, 1129 bp, Arabidopsis thaliana
tcgagcggccgcccgggcaggtcttctatcttctccgtcatcgttctctctctctcctctcccggagatttttactcaggcgttcttctgtggatcagaggtgaaaaagatgaatcattgcaaccttcagcagaacgccttcatgtctcgtgaggagatgatgggatttgaccgtaaggatcttgttgtttgtcctaagcctcgacgtgttggtttactcgccaacaacgttattcgtcctcttagattacatatgagtcaagctgcagccgacttgtgtgattctaaagctggtgctgagcttttggaaatcattcgtagaaaggaggataatggaacaatagggcagttactatcatcatccccaccgtattttcccggttcaccaccgagtagagcggcgaacccattagcccaagatgctcgttttcgagatgagaaactcaatccaatctcaccaaactctcctttccttcagccatattcggcaaccgggtttccatctccatcttcttcctcatcatcgtcgtcttcccgtggttgtgttagaatgaaatttggactcaactcgcctgcagttagagtagaaggatttgattgcttgaaccgtgaccgtcaaaactcgagcatccctgccatggcttagtagacaaacaacaaaaaaacaagtgtacatagagattccggaatcgttcgttcgccaatgcctaacagaggaggatttgattactactgctgcaactattactactaccatttttgaaagtaaatgaatatgtttttgtttttcatcttctcctaagagagagagagagggaagaggaaggaggaagatgaagatcagttaccgtcgccggtcaccgtttaactgttttattcaggttagtgtttgtatataaagatgcagtatttaaaagaagagtcgaatctatgtattcgtttggtgtttttctgggtcgggcggatctttagtactgtttcatatataactaagagggaagattagaagatgaagaagctgtaaaattttcttgggaagaaaactctggtttctatcttctcgttgtaatatagataatcaacttggatttatcttctttcaaaaaaaaaaaaaaaaaaaaaaaaaaaa

SEQ ID NO: 84 - DNA, 1128 bp, Arabidopsis thaliana
ccacgcgtccgtgcacaagcacttgagtattgtagcagcaaaggtcgcgccttgtaccacgatcttaatgcttacaggatcttgtttgaccaggatggtaacccgagattatcttgctttggtcttatgaagaatagtagggatgggaagagttacagtacaaatttggctttcacacctcctgaatacctaagaacagggagagtgattccggagagtgtggtctacagcttcggaacgctgttgctagatcttctcagcggcaaacacataccaccaagccatgcgcttgatctgattcgtgggaagaatttcctgatgctgatggactcgtgtctagatggccatttctcaaacgatgatggaaccgatttggttcgtttagcttcccgttgtttgcagtatgaagctcgtgaaaggccaaatgtgaaatctctcgtgtcctcactcgctcctcttcagaaagaaactgatattccgtctcatgttttaatggggattctacatggagctgcttctccaaaggaaacaacttcgcttacccctcttggtgacgcttgttcacgacttgatctcacagcaatacatgaaattctcgaaaaggttggatacaaagatgacgagggtgtagcaaatgagctctcgttccaagtgtggaccgaccagattcaggagactctaaactccaagaaacaaggagatgctgcgttcaaaggcaaagactttgtcactgctgttgaatgttacacgcagttcatcgaagatggcacaatggtatcgccaacagtttttgcaaggaggtgtttgtgttatctgatgagcaatatgcctcaagaggctcttggtgatgcaatgcaggcgcaagtagtgtctcctgaatggccaacggctttctatcttcaggccgctgctctcttcagccttggaatggataaagacgcctgtgaaaccctaaaagatggaacttccttggaagccaagaaacataacaacagaaactgaaaacttcaagtgtataggtttcttctctcttccgccttcttcgttttgtgattggattctgagaaagcctcattgtctctgtcttctttaagcattatcttaaatttgtggtttccaatttgaaga

SEQ ID NO: 85 - DNA, 1127 bp, Arabidopsis thaliana
  misc_feature (1)...(1127): n = A,T,C or G
gcgattctgaaaaaagctctcatcattttcctctttactctaaccatcatgacaggaaccgcgttttcacaaaactgtggtacaaacgggtgtaaaggcaacatgtgctgcagcaggtggggatattgtggtaccacaaaagcctactgtggcactgggtgccagagtggaccttgcaactctaaacctaaacctactccgactccaagcggtagtggcggtctaaatgctggtcctcgtggtaccatagcaagcgttatcacaccagcgttcttcaacagcatcatgagtaaagtcggaagcggttgcccagcgaaagggttttacactcgccaggctttcatcgcagccgctgaatcgttcgcagcctacaaaggaactgttgctaagcgtgagattgccgccatgttggctcagttctctcacgaatctggaagtttttgttacaaagaagaaatagccagaggaaggtactgctcaccaagcacaacatatccttgtcaacccggaaagaactactatggtcgcggtccgatccaaatcacatggaactacaactatggtgcagccggaaagttccttggacttcctctcttgaaggacccagatatggtggctcgtagcccaactgtggctttccagtgtgccatgtggttttggaacaagaatgtgcgtccggttttgagccaagggtttggtgcaaccacgaggaggatcaacggtggtgaatgtaatggtgggcgtccagctgcagtgcagagcagggttaaccattacttggacttctgcaagaagcttggggtcactcctggaaccaatctctcatgttgaagacactactagtttatgagggtttttcattaatgtcgtctggttaagaatttcgtatcgaataataaagtgaagtcgaaaatactagaacttataaaatttgtaagagattagaagttatattgtgtggttgatgtctcttaaggtaactatattgtgtgttgtttgtatccgctcgctagcataagtaataaagatggaagtattatccaatcaatatattggtttccctgtgttnnacaaaaaaaaaaaaaaaaaaaaaaaaaaaaaaaaaaaaaaaaaaaaaaaaaaaaaag

SEQ ID NO: 86 - DNA, 1125 bp, Arabidopsis thaliana
  misc_feature (1)...(1125): n = A,T,C or G
tttttttttttttttttttttttttttttgtcaaacgaatccaacaccaatatattgaaatttcatgagtttacatgtagacactgttcttttacacaatcaaaataatgtgcaatccagatcaaagaatttactacccaccaccacacaactgtcctgacccaaaaaatgaacgcatgtttgacaaaaaaacaatcattacaataacacaccattttgtggttaagaatatgaagaatcaaacccaaaacccacccatgagaaagaagaaatatattgaaaaaccaaaacaataaaagagtaaaattgaaggaagaaaaacacaagaaactgttcattgtcttcatagctgcggcgctgaggtcactgctaattttttttggagaatccttagaataagtcgaatttcttcttcagtaagtcttgtttccatccaggcaatttgtagaatgattctttctccatcccaaatacagtcttgaactctacctcagacaggtaagcctctctgcgtttgaagtcaatccctgtcacgggtttctcagatttggcttgtagtcgttcgtaggtgaaagttactccagttgtttctacttcagaatcatcctgctttggttttgcttcctcagcactcgcttctgctgcaggtgacacnncctcntcttccttggcttcagtagcttcttcggtagcctccacttctgagaaagctttctcatcttttgcttcagcagaagggctggtatcaggtgatttcttcttctcagcagtgagaacttgggaaagagcagccactgctgctgctctttgtgacgcctggcttgtcaatcctgatcttcggggaggtgactttgatgatggtgaagaattgaatgcggatgttaaggcggctaaagcttcagccctttgtcttggacccccttgacttccatttgatctgtctcggctcggagagcttgttctcccagaagaagaattaaaggcagaagtcaaggcagctaaagcagcagccctttgccttggtccttggttcccactgctagactgatcctccacaacgtggtgtgtaccaagtaataatgctgccttcttctggtaggaattcccttgcacagtagctttagt

SEQ ID NO: 87 - DNA, 1124 bp, Arabidopsis thaliana
  misc_feature (1)...(1124): n = A,T,C or G
tcgcggccgcggcgaatctaccttcttctctctccatgggcacacctttcggtggtcctagcacctccgcacaaaatcctaccggagctccggccaacaaagatcgcaatttggcctctgctgaacagttggtactcgatctcagcaatcctgaactcagagaaaatgctcttctcgagctttccaagaaaagagaattgtttcaggatctggcgcctttgttgtggaactcttttggtaccattgctgccttgttacaggagattgtatcaatctactctgttcttgcacctccaaatctgactcctgctcagtccaaccgtgtttgcaactcgctcgctcttcttcagtgcgtagcatctcattctgacacgagaatgttatttctcaaggctcatatcccgttgtacctttatcccttccttaatacaacgagtaagtccagacctttcgaatacttgcggcttactagcctaggtgtcatcggtgcacttgtgaaggttgatgatacagagntcattagcttccttctttcaactgaaattattcctctgtgcctccgtaccatggaaatggggagtgagctgtcaaaaacagtggcaacatttatnnntcaaaagatactgttggatgatgtggggatggattacatctgcacaacagcagnnnggttttttgcagttggtcgagtgttgggaaatatnnttcagtcacttgtggagcagccttctccgcgccttttgaagcatatcattcgttgctatctccgtttatcagacaacccaagggcttgtgctgcactcgcaagctgtctccctgactcgctacgagatggatcctttagcaattgtcttcgcgaggatccaactgcaagaaggtggctgcaacagttggtgcacaatgttggnnntggtcgcgtcccaacacatcaannnggaggatttgagcacatgctttgagctgaatccatctcaaacccatccatggagtgtgtttcttctgtttttgnntctaattatacatgtgctttttaatgccttaacttagatgatgggttataggctttttagtctgtttgaaattcttattgtaattatttttaagctctagaaccaatcccccag

SEQ ID NO: 88 - DNA, 1124 bp, Arabidopsis thaliana
  misc_feature (1)...(1124): n = A,T,C or G
cttttttttttttttttttttttttatacgaacgattagagcttgtgcatgataagaggagcaccgaactgtgggtgaatggtgaagactgtgtaaggtgcgtgaacataggaaggagaaagctcaaaggagaatctctggagtatcaatgccattgccatctttgcctcaagcaatgcaaaattctggccaatgcagatcctcggtccccacgcaaaaggaaagaaggaggcttggttctttgttgcctttgagagaccgtctttgaatctctctggcttgaactctcctgcatcgtttccccacagctccgtgtcgcgttggactagaaggataggtagattgatcagaacgccgcctggtagtgtcagatctccaagctccatctctttgtgaatggctctgctcagctgaggtattggaggatatagcctaaggacctcatataatatcatcgtcataactttgagctggttgagtccttctgcatcaggttctttatcgccaaacacttgcttcacttcttctcgtgcacgagcctgccaatcttggtgttgacttaacagaaccattgtccaaaccagaagtactgatgttgtctcttgcccgacgaaatagaacaacttgcactcctccatcagatcctcggtactcattccgtttcctttcgtttgccccaaattcgactcaagaagtattcccagtaaatcgtcgtttggtgcttcaccagcttctctggcccttaaccttttgtttacgatccctctcagtataacttggatttctctgnnngctgctttcattcttctgttactttttgttgggagataactacacaaaaaattggctcaaagattctgagagcaccgttctactttaatagattgcagtactagaagacaagtttagtttttcattacctatatccagggatgaaagctttcctaaaagcttgaatgatgagctgtgctagttctgcttggagctcaaatatcctctgcccttctttgtagctgctnncaaatgcagtacgagagatcacanctgcagtcatactcacaagcccaggccaaacgtctacctcacatgacgaccctttatccgatactaactgatcccattcg

SEQ ID NO: 89 - DNA, 1123 bp, Arabidopsis thaliana
cttttttttttttttttttttttttttttttttttttgtgcaaactatgtattcttattcaagcctgaaattggtaaggccttttatacatgaatgttgcaacaattattcccaaataagaaggaatatttctaccactaaaaaatcaaccaagaaaaaaattcaaagtatcccttttttgtaggggttcatttcaacctgaattgaccaaggtgttgctgactgtaatatattctacaatgctaatctttcgaatcactgagcgagacaagaacctggttcaaaaggcacaactcgtccgccaccaaccaaaggtgcagctgcaactcctctttgattcaatagacatctgaagtgagccaacctcgtcgttacattgttgggatttttagccaattttgcatagggtgtccacaaccgctctgcagctgcggcaggcgaggccaaatggtttgttcaatgtcagaagcatcaatatgttcaccccacatgcaaacctcgccaccaagtactagactttgttgctttttatccgttatgttttgaaatggctcgtttgcgtaaaagccttgccaaggtgcgtctatatgatccaaataccaaaattcttggttactaactatacaccttaaaccggacgcagtcacattctcaacaagtcctgtgttaagccagttgtgaaccacggttttccggtttaatttgcttccaaaattgatgaaggtctcttcccagttgataatttcatatccgtgagacaaggcgattttttgcgcccgcaacacgaaatattgataggcttctttttcactcatccgatgttttttaagccattgggctattcgcggtgttgcagaccaacaagttgtatttacttcatcaccacccaagtggacaaatttaaacttaaagatcttgctgaaatcagagagaatgccatcaatgactttgaatgtgaagtcactgctcacgtcaagtggttcttgacaattcttggagggccacaaggcaggatatccctttccccatgagagagcatgtcctggaacatcaatctcagccaagacatggatccctcgtcgccgagcataattgacgatttcagcagcgtcttcgcggacgc

SEQ ID NO: 90 - DNA, 1119 bp, Arabidopsis thaliana
  misc_feature (1)...(1119): n = A,T,C or G
cttttttttttttttttacaaaatctattaacctttatgggcaatatatgatttgttcaacttcagccgatcgacttaaattccccatttatcaatatttttccaaaaccgtgaaataccacaacaaaccaacttagaagaacatgacaagaaaacgcaaaacaaaatgaaaaggaacaaaaaacaggaacattcacaatagaaacactgagccagtttagatatacaagccatcactaaacgttactcccgtagaaggcagccaaagatttcctttaatgaactgagaaacggtgaagttgttagcctgatccgagttgttaaagacgtggtaaccaggccatttgactcggctgctgagtcctgaaccaggcccgtagttcatgaactctccgtagaagagtgtgtccaacgcaaaatcagcgttccactcaagccatccttcgggtctcacaacgtcgctcatattgttcctaatgaaaaccgttctcgaatatagcttccatggccttcctagatacgtccttgtcgtgtttaggtatgggaccaaatctgcgtccgccgagatattgctgaanngaattgagaannnnnngggttggttgacatctttccggcnnngtgcagtgatggtgttcttttggttagggagtcctcttttagccaaaatttgacagttttgaaacacaacagtcccatccccaaatataaaatctactgttcccgtgatggtgcactcacggtagaactgacgcatggtgtgcgtgtagagtgtatcttgataacccctcatcgcacatctgtagaacacagagaggtcagagtctgatctcagtgctaccgcctgatgcttctctggccctgctgtgttctggaacgttatatctcttgctaagaatcctcttccgcttaccgcgaatgtagctgatcggaaagtggtccaaccatcgatgaagctgcggttaccggaaataacagtcacgtcaatgccatcacctaacattacaatgttccatttcttcttcttgatctcaacattctccaaatataaaccttttttaatgtatatgacgaaacgtgtcgagctataatcaggagctttctttatggcgtccatta

SEQ ID NO: 91 - DNA, 1114 bp, Arabidopsis thaliana
  misc_feature (1)...(1114): n = A,T,C or G
tttttttatcaacaatgaaggatattatagtgtagacagtgtcacagaataaacttggtcatatacgtaaaagccaaattagccaatgaacactccaaaactttacaaagatacgagagaaaagttgaagaaacagaagttcatcgatacaacgatttgcaggtagccaaaaaccgtagttcagtggctttgtcttcccattcaacaccttctaaccatttgttttcgccgtattttacgacaagttctacacctgcagttccactcttggagttcaatggaagctttttcagctttggacaatgttcttgcactgcaagctcactcagacgtggaaaagacaatggtgaccagtagatgctctttagcttaggtaaatcagataagctaagacattctagtttttgaaaaggaatgataatacttgcattctcgtccgtaacacttgcagctttttcttcactgattatatcctctagttgctctgcgaaacgagcgtcgagataagtaaggnntggagcaaacaatagnnatgtcaactcctttagaccatcacattgtcctataacgactttggagaggctagagaagcatgatgatgttctcatctcgacttttatctccttcattccacacttccatatgccaattcgacggatattacacatgnnnngaaaagttaatattttgaaagattcttcctcaaccnnnnnaagctctacatattgaatagatttcgccaatctctgagagcataacaaatgttccaaaaccaaacttgaaaagatatctatggttagaactnnnnnntgttctaagagttgtagctccttcgctgagttcacatctagagcctttttggacttttgtagtctcagtgtcttcaaactcaacaacttagataccccagcaatactctccaaactcttcatggactccaaattcagatgtattagttgtttcaactcttgtaaaccaacaggcaacctttcgatgtttgtatacgacaagtcaagatatcgcaaggagactaactctgatattttctttggtaatccagtgagactactattccatgataaatccaatacgacaaggttaggcatgaatcgaa

SEQ ID NO: 92 - DNA, 1114 bp, Arabidopsis thaliana
  misc_feature (1)...(1114): n = A,T,C or G
tttttttttttttttttttacagaagaagtttgatgtcattactcattagaaagaaaggtataacacaggaacggaaacatagttgaacaattattcatcaggggctttacaaggccccaaaacacaaaccaccaaagttttaaatgaaacgagacatgaacttcttctgattcataacagagataagtttttagaaaccaccacggagccttagcaccaagtgaagggtagactccttctggatgttgtagtcggccaaagtacgaccatcctcaagctgttttccagcgaagatgagacgctgctggtccggagggataccttccttgtcctggatcttagccttcacgttgtcaatggtgtcggagctctcaacttcaagagtaatggtctttccagtgagagtcttcacgaaaatctgcatacctccacggagacgcaacaccaagtgaagtgtagactccttctgaatgttgtagtcagccaaagttctaccatcttcaagttgttttccggcgaagatcaatctctgctggtccggaggnattccttctttgtcctggatcttggnnnngacattgtcgatnnngtcnnnnntctcnnnntccaaagtgatagtctttccagtcaacgtcttgacaaagatctgcataccaccacggagcctgagnnnaagatgaagtgtggactccttctggatgttgtagtcagcaagagttctgccatcctccaactgctttccagcgaagatcaacctctgctggtccggaggaataccctccttgtcttggatcttggccttgacgttgtcgatggtgtcagaactctccacctcaagagtaatcgtctttcccgttaaggtcttgacgaaaatctgcataccaccacggagcctgagaaccaagtggagggtggattccttctggatattgtaatcagccaacgtacggccatcctctagctgttttccggcgaaaataagcctctgctgatccggaggaatgccttccttatcctggatcttggccttaacgttgtcgatggtgtcagagctttccacctcgagggtgatagtctttccggtgagagtcttaacaaagatctgcatcttga

SEQ ID NO: 93 - DNA, 1109 bp, Arabidopsis thaliana
ctaaatctccactctctcgcgccttttaccccttctcagaatcttaaccatggcggcgacgagcgagcacaccatcttgcaatttgtgtctccgtcatcaacggcgtccgctacaacctctgtactcacggcgaggatccaccctctcgttatctttaacgtctgtgattgcttcgtgagacgtcctgactcagctgaacgagtcatcggaactctcctcggatctatcttacctgacggaaccgtcgatatccgcaattcatacgccgtccctcacaatgaatcatccgatcaggttgctgtggatattgattaccaccacaatatgttagcttcacaccttaaggtgaattcaaaggaaactattgtcggctggtattcaactggtgctggggttaatggcggtagttcgctgattcatgatttctatgctagagaagtacccaacccaattcacctaactgtggatactgggtttactaatggtgagggtactatcaaagcttttgtctcttcaaacctctcactcggtgatcgacaactcgttgcacattttcaagagattcctgttgatctccgcatggttgatgctgagagagtcggattcgatgtacttaaggcaacatctgttgacaaactcccaaatgacttggaaggaatggagttaacaatggagaggctgttaactctaatcaacgatgtctacaaatatgttgacagtgtcgtgggaggtcaaatagctccagacaacaacattggacgattcattgcagatgcagtagcctcccttcccaagttacctccacaagtcttcgataacctcgtgaatgatagtctccaggaccaattgcttctgttgtacctatcaagcataacaaggacacagttgagtctagcggagaagctaaacacagctgctcaaatgctataataagcttggaaacacaaggttttgctaaaaatggggaatgctgcttttttggtttcgaattttcttttaacaagtttatgtaagaatcagcttcttgttgtagtgttcctaaattgcaagtttaagaaagacaaaatgctctgtttcgtgaaaaaaaaaaaaaaaaaaaaaaaaaaaa

SEQ ID NO: 94 - DNA, 1109 bp, Arabidopsis thaliana
  misc_feature (1)...(1109): n = A,T,C or G
ttttttttttttttttttgaaacatcattggaaagagttttattagtctgatattattgttttgataatacaaagctgcgtattatattataataataatactctcgttactaaatagcagcttcgaggaggccgttaacgaaggatctttggttgtaacaatcaagattaccaccaggattaacaccaaatatgttacaatacctctgataaaaccctatacgatcggcgactctcccgtcttggccacgtccacactccaatccaccgttaatgatgttcgtaatcactccataacccggtaatctcccggcggcacggtcggcgtctgaaggctgccactggccggctatcacggcatggcaagacggtttgggaggctgagcagtcatccagaaccaaatcgcggctttgaangcgatcactgcgtcgttggcaacaaggtcannntngttgagtangtcaacnnnnnttgctctaccgcatagaccgtaattgtagttccacgacagttgcatcggtcctcttccgtagtagcgtttgccagatgcgcatggccacgtggcgctcggttcacagtagtctgaagcaggattnnnnnnntgcttgaaacagtagccccatgaatatggtccgtntggtgctgtagcccatccacctgtagtttcatgggaagtctggccgaagaaggcggcgacctccttcttcctcgtggcggtgtctccggtggtgccaaaaccggggaangactttgcagcggtgataaaggcgttgtaagtgtagaaacctctagcgggacaagcggcatcattcctatgcttaagcatatcatcgaactgagaacttgaaatgatgcccgaaagatcgccggtgggtccaggaggagtaccaccgggagtgcactggctttggcagccaggctgcttacagtatggttcggtgttaccgcaccagccgaactcgctgcagcatagaccgttggggcagagtgctcctccagcttggcgaccacattgctcggccgaggataatgataggagaagtgaaaagatgagaaagagaaaaagattagtcttcattttgttcaatgttctatggcggacgcgtgg

SEQ ID NO: 95 - DNA, 1108 bp, Arabidopsis thaliana
  misc_feature (1)...(1108): n = A,T,C or G
cgcgtccgaggatttggaacaattagtagaagtagagagcaaggtggtacctttgatcatcgcagtatcaggagatgttggctctgagacacctattaagtgtgagcatagtgatgttctcggtgtatttctcaagagaacggcagaacaacaggttttgagacgtaattggagattttcatgggttcgaaatagtacattgatgcagccgatgactaaggaagtcccctggtatctggacgacgggacaggtcgtgtgaatgtagatgtatctcaaggtgaattaggcttggcgttgacggttggtagtgatgtatttgaaaaggcagagccggtatcgcttgttcaaggagcgttgggttatcttaaaggctttaagatacttggagtaagacacgttgagcgtgttgtcccaattggtacaccgcttacagttgttggtgaggctgttagggatggcatggggaatgtcaggattcaaaaacctgagnnnnnnnctttctacgtcacttatataccgctagatcagctcatctctaaattgggagatttgtcaaggttnnttcttttctctgtttttgcctattcttttcttcgaaaactatgattgaaaaaaattctaaaagatctctttcttttnncaggaggttcaagtatgcctccatgggtttaactgttcttggtgtgattcttatttcaaagcctgtgattgaatatattctaaagagaattgaagatactctagaaagaaggcggcgacaattcgcactgaaaagagttgttgatgcagctgctaggagagccaaaccagtaactggaggtggtacaagcagagatggtgatacacctgatctctgtgtggtttgccttgaccagaagtataacaccgcttttgttgagtgtggtcatatgtgctgctgcacaccatgctccttgcaactaaggacctgtcctctttgccgggaacgaatacaacaagttttgaaaatttaccgccattgaaggacaaaactcagaacgatttttacaagcgaacaattactagtcttgtacatatagtaaagcctttgtatcatgagtttttgactagaaatttttttgcaaaaaa

SEQ ID NO: 96 - DNA, 1108 bp, Arabidopsis thaliana
tttttttttttttttttttttttttttttagagaaaaagaggttcgatttctatacaaagataccacaaaggaaagttcacaaatttacatagaatagaccacaaacaaactctctttctctgctctcattcacataataagcagccgctcactttccggggacgaagttggtggcgaaggcccaagcgttgttgttgactgggtcggccaaatggtcggcgaggttctccaaaggtccctttccggtgacgatggcttgaacgaagaatccaaacatagagaacatagccaaccttccgttcttgagctccttcaccttcaactctgcgaaagcctcggggtcagtagcgaggcccaatgggtcgaagctgccacctgggtaaagcaagtcctctgcttctcccaatggaccatctccggcgactctgtagccttcaacagctcccatgaggataacttgagtagcccaaatggctaagatgctctgagcgtggaccaagctcgggttgcccaagtagtccaatcctccgtcgctgaagatctgtgaaccggccttgaaccaaaccgcttctccgaacttcactccgttcctagccaatagctcagggaaaacgcagcctagggctccgagcatggcccatctgctgtggataacttctagctcacggttcctggcgaaggtctctgggtcggcggatagaccagcggtgtcccatccgtagtcaccggggaactcaccggtaaggtagctcgggggctcgccggagaatggacccaagtacttgactcggtcagatccgtaccatgggctgcctgatggaccctttggcttggcgacagtcttcctcatggtcacacggccgcttccgaggacatctgatgcggcaggcttcacagcctttccggcgaaggcaggggaggacaaagccatacctccaataaagagcttagaagatgacatacaccttattgcttgaaaaagcgaagggcttgataaagaaacctgagcattgagttgcttgtttgtggtctgcttcaatatgttcccgaatttactcaaaaaagccatcgcaattagatatctctacactgacttcgcttcctctg

SEQ ID NO: 97 - DNA, 1107 bp, Arabidopsis thaliana
ctttttttttttttttttttttttttttttggcatcatcagccaaattgtgtcattgaacattagttgcagtcatgttgcatctcgatggtgatatcaaacaaaacatcacgcgcctgtgctcttgcctgatatgaagttgaacttcttgtgtgcaaccgccattatacgcgatgccttgctccagctgctaggtgacacacgcttgttgatatatgcttgatatgctgtttcagctggtgatggtatagcagcgctacgagacgtactagcacggaaaagctatcagacacggctgattgagcaggtatattctgtttgtgtactacgcctgctttgtcacaacgatgtaatgcgtgcatgacatcctccctcacatcattgcactccttcaagtacttctgtgtctcctcatcatctatgtcaacacgccgtagtacgtctatatactcatgcagtattggcatataccgtttgctcagctgtatggacgcgccacgcagcctgtcgtacagcgcactattctcatcgtctctccactgcaccgacacatcatgcaactgaatttcgacctctaacagatgcagggcaatgaactcaacgctggatatcgactgcgttgcacacgtgacacaccgtacacagcacaaacctggctaaggtggtttgtttgtccaagtcatttgattcgcaatgcgtcatcgggttgcttgggtttcaacgagcagttgggttgtatcgttgtatcagcagcatggcgcgactcaggcccgtcatcagatggcgtgcttttgcgttcgttgaatttctcgcgtatgctcttcgttgtgttgttgattgcaccttgtatcctgcctatgtccatgaacgtccatgcgacgtagcccatgacgccaatcaagccgactgcgatcgtgagttcgcccatgccccagaacagcgctacaaggctgccgcctcgttgcttcagctcgctgcgtgagtatggtgattgtacaatggtgcggtgctctattggcttatgcgtatcatgtgtacgaaatgttgatctacttgatggtattggctcgtatgcactggcaagtggcgagtggtcgtcatcagtagt

SEQ ID NO: 98 - DNA, 1106 bp, Arabidopsis thaliana
  misc_feature (1)...(1106): n = A,T,C or G
taactcttgtttatctaccagttgaaagatgttttacgatggatacgcttatcatggaactacctttgagcagacttaccggtgttatccctcatcctttattgataagcctcaaattgaaagtggtgacaagattataatgccaccatcagcccttgatcgtctagcttctttgcagattgattatccaatgctctttgagcttcgtaatgcttcaacagatagtttttctcactgcggagtccttgagttcatcgcagaagaaggcgtgatttacattccctactggatgatgcagaatttactgttgcaagaaggagacatggtgagagttagaaatgtcactcttccaaagggaacctacgtgaaactgcaaccccacacaacagactttctcgatatagctaacccgaaagccatcttggagaccgcattgaggaactattcatgtctaacggtcggagatagcattatggtcccatacaacnataagaaatacttcatagacatagtggaggcaaagccttctaatggtattagcatcattgaaactgactgcgaggttgatttcgcacctccccttgattacnnnnnacccgaacgacctgtagcacctgctccagccaaaggtgaagcaaaagctaaggaggttgatgtggctgaagcagaaccaaagtttaaccctttcacgggttcgggaagacgtttggatggacgacctttatcctatgaaccgcaacctggtgctgctaacagtaacggccaatcacatcctgttgcaagtagtagtagtagtgggtcagagaannnacgcaacaaaatcgagggaaacttgtgttcggttcaaatgtagagcggtctactaaagagacaacaaaggttggagctgggaaagatagaaagcaagaggaagaggctgagaaggaagccaagttccaagcntttagtggtaaaaaatattcattgaggggttgaaccaaccaatgtgtggaaccaatctctcgtcnnntttatgattttactcttgtgcttatgtattatctatggaatcaaacgtttaaaggaagaaaaaaaacacaaataaattcaagaaaaaaaaaaaaaaa

SEQ ID NO: 99 - DNA, 1106 bp, Arabidopsis thaliana
ctttttttttttttttttttttttttttttttttttttttttgagaaaaaaaaaggatttcaaatcatactttaatacaagagaagaatcattaatctaaaaagcacacattaattaatgatacaagcataagggaacgatagaggaaagaatcaaagggataggatttgatatgatatatttggtaaaccaagacaggaaagattggagctctgccattctcttctcacttttttctccaaagcatcctttataagtggagtgagtttatcatatggaacaagtgtagcccggaggtggatttttgccacaggtaaggagaagctgaagagcaacagggacataaagattgaggtcaagagctttgagcttgagggtagtgcagagacaagccgcggcttcgatttcaacgaggcctttaagtaacggacaacatttgttaactgctggatccccaagccctatctttactaaacctcccaacaagtcgacgcaagcacctaacttcagcgtgtctattggacatgtcgccttcccgccccctgatggtggctttacgctccctggcggtggaggacagtccttccctcctgtggctggtggggttgttcccggtggaagaataggacctacaattggcaaaggtggcaatggcagattgggacctaccactggaggtatgggtagccctgaaatcggaggaaggggtagcttagggacggtcactggaggaacgggtagcttaggtacagttaccgggggaacgggtagcttagggactgtcactggaggaacgggtagcttggggacggtcactggaggaacgggtagcttggggacggtcacaggaggaacgggtagcttaggtacagtcactggtggaacgggtagcttagggatggtcacaggaggaacgggtagcttagggacggtcaccggagggactggtagcttagggacggtcaccggaggaactggtagcttagggacggtcaccggaggaactggtagcttaggggctttaggggagtgctttccgcccttccgtgggttgcaagagccgcatgcgagagaatgttgggggagatagataatgcaaatgagga

SEQ ID NO: 100 - DNA, 1101 bp, Arabidopsis thaliana
  misc_feature (1)...(1101): n = A,T,C or G
ccacgcgtccggaccgtctcctcaagatggaagaaaccctccacaaacgtatcataggccaagacgaagctgtgaaagccataagccgagccattcgccgtgcacgtgttggactcaagaatcctaaccgtccaatcgctagtttcatattctcgggtccaaccggtgttgggaaatctgagcttgccaaagctttagcagcttactacttcggttccgaagaagccatgattcgtctagatatgagtgagttcatggagaggcacactgtctccaaactcatcggttcacctcctggatatgtcggatacaccgaaggaggtcagttaannnnnncggtagacgtcgcccttacaccgtcgttctattcgatgagattgaaaaagcccatccagatgttttcaacatgatgcttcaaatccttgaagatggtagattaacagacagcaaaggaagaacagttgacttcaaaaacacacttctcatcatgacatcaaacgtcggaagcagcgtgattgagaaaggaggaagacgtatcggattcgacttagactacgacgagaaagacagcagttacaacagaatcaagagccttgtaacagaggagctgannnaatacttcagacccgagttcctaaacaggctagacgagatgattgtgttcagacagctaacaaagctggaagtgaaagaaattgctgacatactgttgaaggaagtgttcgagaggttgaagaagaaagagattgagcttcaggtgaccgaaagattcaaagagagagtagtagacgaaggttataacccgagctatggagcaagaccgttgagaagagccatcatgaggcttttagaggatagtatggcagagaagatgcttgcgagagagatcaaagaaggagactcggtgattgtggacgttgacgctgaaggtaacgtcacggtgctaaatggtggaagtggcactccaactacttccttggaggagcaggaagattctctccctgttgcttaaataaaaaaagcaaagtgcgtgcgtttctctcttcttttgctttggcccttaaatgaattatggcaagagaaggttatgaattgagatac

SEQ ID NO: 101 - DNA, 1101 bp, Arabidopsis thaliana
  misc_feature (1)...(1101): n = A,T,C or G
cttttttttttttttttattaaaaaaaataaaatctcttattgattaaattatcaagcgtcaaaacgaaataggtctgctttacaagtcaaagaccttcgatacattatctttgagactacttcatagagatttttaaagcagaaagattacaaaatctgaagatcagtagttcagtagagataaactttcactgattcacagattattgcataacaaaaaaaggaaaatgaaagattgtaagaacttgttcacttctttgaagaaactgttgatgaatctggctctttccatgcagcttgccattgtttgtcatataacgtagtctcatcgaacagatccttaagtttgtctaaatcttcattcttacggatgaagagaactccagctacagccacaaacaagagtgttttgcagaagaaattccccatttgatcaacaagtcctactccggtaagactatcaacaaagtaagccatgaagaaccctatcatcgcagcacgaccattgagaagttcagcttcaggtagatggtatctcttcatccatgcccancatggaataatcgaagtatcgaagacaacaagctcgtcgttactcgttgtttccgggttatcttcaagccattttctcctctttgcctcagaaacgataacagaatcccaatcagttttgccatctttctcgaactgtttcagatcccaagttccattaacccacttcgcattttgatatttgattaccgtctcagtactcgaatcagtcgcttcacctccaacggcgccgttttcagaagcggaggagctttccgccggagatttaaccggaacttcctctacagctacagacgcaggcttcggaattttcacgacgggggaagtcgtaccattgtcggaggaagctctagggacggagattagagagaaacgtttggtggagagaagagaggttgagatcttggggatgagattagggttttgaagtgaggaagagatcggcggagagaataacgccatggatatagacattgcttgttgaagatctctctctctctctctctctctctctctctctctctctctttgtctctctttgtctctct

SEQ ID NO: 102 - DNA, 1100 bp, Arabidopsis thaliana
  misc_feature (1)...(1100): n = A,T,C or G
ccaaagaggaaggtactcatgaagaaccgttgctgacaccttctacctcagcttcaaaccttgggcctatctttgagggagatgatgagtcggatatggaaatacttcttgctgaagcagaaggtgccgtgaagaagaagagaaaacccaggagaggtgaggatttcaagtttggccaagtttttgtcaaggcagatttctggctcctttggtttgtctacttcctcggcatgggttcaggtgttacagtctcgaacaacttggcacagatcggatttgcttttggtattaaggacacaacaatactcctgtgtcttttcagtttcttcaacttcataggccgtcttgcttcaggtgccatttctgagcactttgtgaggtcaagaacgcttccaagaacactatggatgggagccgcgcagctagttatggtgttcacattcctcctcttcgccatggctatcgaccacaccatttacgttgcgactgctctaatcggaatatgcatggggtttcagttcttatctatcgcaaccatctccgagctatttggtcttagacatnnnnnaatcaacttcaacttcatactgctgnnnnncccgcttggtgccannattttctcnnnnnttctcgcaggatacatctatgacaaggaggctgataagcaagggaagatgacctgcattggtccagattgcttccgagtaacattcttggttctagccggtgtttgtgggcttggaaccctgctgagcattattttgacagtgagaattcgcccggtttatcaagctctatatgcgtctggctcattccggttgcagccgcaatcaacgggtcattgatatatccagagagcgagaggctgtttagatgaaagaatatatataatataactacactcatagatgctatctacttttcattattattataggctcctactgtatcgtggggcatttttgtttgggtgtattctaagatttgtaactcttgtgttattccgctgtaaccggccaaaaaccggttggaagaacctatatgtatcggcttcttgatgaggttgtaaggttgttgtttgatagttgtattacaaaaaa

SEQ ID NO: 103 - DNA, 1098 bp, Arabidopsis thaliana
  misc_feature (1)...(1098): n = A,T,C or G
ccacgcgtccgtaatctctctccctcactctaacaccaaaagaagaagaagcattttccaaagagaaagagagagaaatgggttccaagattgtccaagttttcttgatgttggctctattcgccacttcagcactcgctcaagcccctgctcctactcccaccgccactcctcctcccgcaactccccctccagtcgcaactcctcctccagtggctaccccaccacctgctgcaacccctgccccagccacgccaccacctgctgcaaccccagctcctgccactactccaccgtcagttgctccttctcctgctgatgttcccaccgcctctccaccagcaccggaaggtcccaccgtgagcccaagcagtgctcccggaccttcagatgcatcccctgccccaagcgccgcattctccaacaaggctttcttcgccggaaccgccttcgccgctattatgtacgccgccgttttggcttgagaactttttttatataattttttttttatccctcaaattatttcaaatctttggtgttaatgtgagaatttgatttattttcgtatttcgctatttgatcgttaattttttttatcatgatttcgtgtgtcggaatggggaaagtaattattatcttggttgaagctaatggaatgttgacacgtgtaatttaccattggaagggcttcatatggttgtgtagaggaggtggaattaatctgtttatgtaaatccaatgataataaatcaatttcaaaaaaaaaaaaaaagggtggccgcnnncgatctagaactagtctacaagtagagtacatgacatgtccttcctccggcgctgacaagcttcctccaagatgcaactgttgtcttgctcccaaaaattgtactctccatctctctgattctactactatccattgtagcaaatgatatatatctagtaagaaatacctgatggtatccctccttcgaatcccatccattcctcccactcatcgatttcacccatttctgtaatctccatttcttcttcttctttcttaaacttttgcatcaaacactgaaaatgtgattaatataaggaaaatggttt

SEQ ID NO: 104 - DNA, 1097 bp, Arabidopsis thaliana
  misc_feature (1)...(1097): n = A,T,C or G
cttttttttttttttttcacgttcaacacagagactagcacgattattaactatacacagatctcaaattgtgttaatcaaccaacagtcgaaaaaaaacctgtaacattttgtaatatatatgttgattgttcatgctttatagtagtgtgtcctccacgaggcctttgtgagagacgagttattattatacgtagtcgctgtaattctctgcagcttatgtgatcttatcggtcgctgctcctgctcgttgacgttgatcgatgtagcttttacaacatcgactttgactatgtgatggtccgaggttcctttggaagacaacacggaatacgaccctggcacgaaccggtacgngaatcggaggaagcaagtatgtagtccacgcgtgtcccgtacttgcatgtcccctgcacactttggcctttgncgacaacaaccacagattcgcattctccagcaaagtcnnnagcgtcagtgtattctttgctctttaagaatctcatcacnngtgcttttggtattggcttacccatctcttcgtaatacttgacgatgtcggtccatctctcaggagaataatcggattcgtcgagagaattgagagcaccagcgagtatgtgcggtacgttggtggattggataatggcatcgacttgcttcattctccacttctcgtccaagtgatccagatgagtgcagtgaaactccacttccccgctcccgggaacctctatgctcgccttcaacacgttcctgaaatcagtgtggtcgaagattcttagaacattggagcttttgatgggccacttagagagaatggcgttgccgtactccggcgcccagctctcggcgaagacgtaattcatccccagcgccgcagcgagatcggagagcggtctcatttggtcagcctcgtccgccttgacgtcttgaagagccagcacgtctgcgtctagctcactcagcacttccagagccgttctggtgctccggagaccgatctcgccgggcctgaggggagagtgctgtggatcctcccggaagctgagctggcggctgatctcgttgtcggggagattgatgcggacgcgtgg

SEQ ID NO: 105 - DNA, 1097 bp, Arabidopsis thaliana
cttttttttttttttttttttttttcgagagaaattaattttattaatgtgtctaagcagcaaaagcgcaacggatgtgttcaaatcgcaacccaccgaaaaaaacagatacgtaaatccgagagtacattaagcaatcatatgacaaagttcaaatgcaatgcgacccctccagcccccaaccaaaaacagccatgactctcggggagacacacacacacacacagagcatacgtcacagcttaagcatcagcaaacccaagctcagaaagcttcatgtgggcctcagcgtaatcagcgaaaaaggcatcttcatcagcagcgtatttctcgaccaaaggacggaaaacagggtcgtccaatagtgctttgtcagagacaagctgaagaaggccttccttctctccgctcaagagttccttgaagtaagagttgtcgaagattagagggtttgatgtccatgcaccttcgaagccagacctatccttgtggcatcgtcccagagtgtgggcaccagataaagcgacaatgtctttgtcagataagcccatctgcttagcaaagacatctctcaaatggtcacaacccttggtagcatcaggaagacgaccctctggaggtggttggggtttgtcctctcttccagggtggaaaggaatgtcagggccaccagtaacttcaacggccacaacaccagcaagctgatggaaatcagcaaaagagatggtagggaattgctccctgatggggtccaacaacctaagagcaatgtggataccactgttggctccatgagcttgctcagcgtcaaacctcattgttccgaatggacctccagtccttgattgacaatcgaaagttccagcagagtgccatgcgagtcggaccatgatgggtgcacagttcttctcagcgatcaaacctctgagcttcctcctgcacttctcaacagccttcttgtaatcttcgctcacggttgggtagttcttcgtcatcttagctaagctcacagaacagaaacgagagagctgacgataataacgccgatcgcagcaacgaatcgtggatctacttgtttcgaggaaggataataaaat

SEQ ID NO: 106 - DNA, 1096 bp, Arabidopsis thaliana
  misc_feature (1)...(1096): n = A,T,C or G
tttttttttatacaaaaagttttaacttattgattattattaatatacaaaaccacccggaaaaaaaagtatatgacacaaatggttcacacaaactgtcctaatttggaactcttttctctcttaattagtcaacgatcatttcacataaacttttatcgagctacttacttatcatagtcttctcatcgcatgggaagaaaaatccaagaaacttgggaaataaggaaccaaaccgtgaagagactgaggagaagaagctggtgatgatgttgtaagaaatagagattgactagatgaatgtgggaatgaaatattagtaaacggtggtaatggccaatttaacgccggaattagcggcgatggcatcatgtgattcgccggatttaggccgtgagccgaagccattgccgtcagcatgtggttgtgcattccaaatcctaatgtcgccggaagaaaataaggattcacccccactgttgacatcatctgaagttgaagttgaaggtttttcatatactctatggtcttgtcgagaaccgnnnnnttgtccgtcttgtgacaattaggtacgagttgctgtagcttacgcatcttattactcatcttctcgtctcttcttcttctcttggaaccttttcgagtaactgaaggaacttctcttgtaaactcctccgattcatcatcactacttaagacctggatacgacgttttttggggttctcatgtttgtttctcagataaaatcgatgatctgatctctctgaaaaatctttaatatgatgatgatcatcagtttcagaatgttcatcagggacaacaaccaataaatcctccttcgcattttctacttctttatgaatctctggaacaatctgaagataattatcagtttgatcatgatcaaagtagccgtagccccattttagaccgttgattagacgatcttcatcacttcttgctctttctgacatcatgccctgatctttcacagcaagtgatccgacgtcgtttctccatcccaattccatgaaagcttgattattcgacatgttagttaaagagatatcggagatgaaaagtttggagaagtgt

SEQ ID NO: 107 - DNA, 1094 bp, Arabidopsis thaliana
  misc_feature (1)...(1094): n = A,T,C or G
tttttttttttttaaaaccaagccaagaatttttggtcttgtttcttgactcttgattttttacttaaaaagtggaaactttatgacacttaaatgtgtgtattgttgtaacctatacatttttctttttcttttcttctcaagtctatactctaaaaaactataacnangcttgttttctctctttttatagtttnnattccatttaaggaaatgtaccggtcaagcgaatatggtcgagggttcgcctcagaccatgcttaagaactgcttggttaccttgcctgaacccatccccatatgccgatgaagaatccgactcgatttgatgcttgnnnaactcaccaagtttcttctcaaaatcagacctctcacctttcttggacgatgctgacaccacagcagatgatgaagaagatgcgatgtctactaatgtagagccagcataagtctcagattccaaccacatgtgtgctaaaacttgacatattccttcttccacttctggtctaagatttggatacccatttagtcgaagccatgcatgcatcatctcatgagcaaggattgacccggttaacaaacgaggaagtccatataaaatgagaatcgcagtgacttcacaacgacgtatcagcctgcaaggctctgtgatcatgtctattaacttgtagcctgccccaattcttggtctccttaacaccgtggtgacagtttgttcttcagacaaacaaagtcctctagtttcaggtaaatgatgatgtccgtgtttctctccttccatagcttcgtttagagctgatctctccaccaaaagcataggaatttgctgttccactttcatatgtaagccttcgtaaaattcacgtatctcaaggtacaatggttggcattcatgagtgtccataatggctgagtcgagacattcaagacacagttttcgaccatcatcaagaatgagatattttgtatcttttggctccattcgctcacaactgcaacaccgaggagttccatcacgctcatgtgaaggacaatacttttgcatccaaaagggatgtgccctatactcaataagaccagctggacggacg

SEQ ID NO: 108 - DNA, 1094 bp, Arabidopsis thaliana
  misc_feature (1)...(1094): n = A,T,C or G
caagattggatccataaggatagatagtaagacgacagtagtgaattacaaataagagtgtcctgagacaggcatgcaatacattcaaaccagagagacatttagggctaaaccagagtacaagtaacatagacaatcatgatatagggaacagagaaactctacttttcactattattcaccgcacattcagttcttgaaacatattgtccaggtgcacacatatcatatcactctgcatcgtctccaccagcaccaggtttggcagaaccattcgtcttatgagcatcgtctcctccttcttctgagatgtcagaagtccacaaggtcagattgtccctaaggagttgcattattaaggtgctatctttgtaggattcctcgttcagagtgtcaagctctgagatagcttcatcgaacgcctgcttagcaaggtgacatgccctttcaggtgcgttcatgatctcgtagtagaagacagagaaattcaaagccaaacccaatctgatagggtgtgttggagggagctnnnnctcagcagcagtagtagcaatctcataggctttcaaagactgatcagcagcctctttcctctcgttccctgatttgaactcagcaagatagcggtaatagtcanntttcatcnngttgaagaagacagtagattcaccctcnnaagccgaaggaatgagatgctcatctaagacagacataatatcaatgcatatgttagaaagctctaactcaannttctccatatactctttgatcctctttacattaacatcattccctttcactgcttccttttgttcaatcgacgagaagatcctccacgaagctctccttgaaccaatcacgttcttgtaacccacagagagtaagttcctctcttccaccgtcagatcaacattcaatttcgcaacacttttcattgattccaccatttcttcataacgctcagcttgctcagagagcttagcgaggtagacgaaagtgtcacgctcttttccagaacccatgacnnnntcaagattctcgaaaaatcaaaagtatcaaattccaaagcttttgacgactgatccgagtatgta

SEQ ID NO: 109 - DNA, 1093 bp, Arabidopsis thaliana
  misc_feature (1)...(1093): n = A,T,C or G
agtcaccatgttttacgacgcgtgtctctttttcagccggttttcttctcgctggttacatcagagcttcggagatattatataactcaacgacgtagctgttgcattttttgtttttgcaatgatcttcatcttcatgaccggataaactcttagagaaagattcaaagtgattatctttgtggatccctccattgctatgtggaatttagcttcaaaatcgatcagagaaggttttatatcgaagggagaagaagctgctacaaaaccaagaagagctactttagatagatcaggagatggaagaaagacaacaaaggaagaaaaattggagtgtcccatttgctgggaatcattcaacgttgttgagaatgtaccttatgtcttatggtgtggtcatacaatctgcaagtactgtctcttagggcttcaacgtgccattgtcatcaaatcctctgctttaccattccagcttcccttcttcgttgcttgcccttggtgcaatattctctcttnnnnnctggtttgcaatggaaccatcagatttccttccaagaacttttaccttctgtggatggtagaaagcatgaatggctccagatcnganncacccagcgacannaaaagggttgcttcagggcagagagacttgagaaataggtgtgatggaatgagtaataccgccttgggtgatgaagggttgctggacaannncagctggtggaatggtgtgaccagaggattcttcagaactgggaggctccatgactcggtacgtaagtcaatggctcttgttgctcatttgttggctaagtttcctctggtagtcatattcctgttgatggctttatatgcaatccctgtgagtgctgcagttctcggggtttatttcnntgttacgtttgctttggctgtcccgtcgtttctcgtcctttattttgccttcccgagcttaaactggctgatcagagagattgcaacctgactcattgtactgtttctttcttcctgtatgtttcctgacttgtaagaaacacgagatagagccaacgttgtttacactcaatatagacaagaagaagagaagatcttt

SEQ ID NO: 110 - DNA, 1091 bp, Arabidopsis thaliana
  misc_feature (1)...(1091): n = A,T,C or G
ccacgcgtccgtgtgaaccaacggccaaaaaatggcggctctactcggtatcgtctctcctgtgactttcaccggaaagcacccggtaaattcccgatcgcgacggagaacggtagtaaaatgctcgaacgaacgccggattctcttcaaccgcattgctccagtttacgataatttgaatgatctcttaagcttaggccagcatcgaatttggaaaaacatggctgtctcatggagtggagcaaaaaaaggagattacgttcttgatttgtgttgtggaagtggtgatttagcgtttctcttatctgagaaagttggttcaactggcaaggtttatgttcttagaaatgtgtagcttggcttgattgtaaaattgttgttctgataacttggtaatattattataggtgatgggcttggatttctcatctgaacaactagctgttgcagcaactagacagagtcttaaagcaaggtcttgttacaagtgtatagagtgagctcactggtggattgaaggtgatgctatnnntnnnncatttgatgattgtgaattcgannnnnttncgatgggttatggtcttcganncgttgttgatagacttanagctatgaaggagatgtatcgggttttgaaaccaggttcaagagtatctatacttgannncaataagagcaaccaatccgttactacgtttatgcagggctggatgattgacaatgtagttgtccctgtggctactgtttatgatcttgcaaaggagtatgaatatctcaagtattcaatcaatggctatctaacaggagaagagctagagactcttgctctagaagctggcttctcaagtgcctgccattatgagataagcggtggtttcatggggaatttggtcgctatgaggtaaaggaatagcgcgtttgactacacttctacaccagatatattgacacaatctttatctggatttttataagaaaagagaaacgctttgcgttaggatgatgcagataatgtagaggaattcatttttatctgtataacttacttgtttgatcaaactgtcaatgtaatctgtttctgatcccaaaaa

SEQ ID NO: 111 - DNA, 1091 bp, Arabidopsis thaliana
ttatctttattccccttggagttatctcccttttcgcttcccaggatgttgtggagatcgttgatcggtatgatactgagtgcattccggcacctgctaggactaacaaggttgcatatattcaaggagatggagataaagtttgtaaccgggatcttaaagtgacaaagcgtatgaagcaacctatctatgtttattaccaacttgagaatttctaccagaatcaccgaaggtatgtaaaaagtcgaagtgattcacagttgagaagtacaaaatacgagaatcaaataagtgcatgcaagcctgaggatgatgttggtgggcagccgattgtgccgtgtggtctaattgcttggagtctttttaacgacacatacgcgttatcaagaaacaatgtaagcctagctgtgaacaaaaaaggcattgcatggaagagtgacaaggaacacaagtttgggaacaaggtcttccccaagaattttcaaaaggggaatatcacaggtggtgctactttagatccaagaataccgcttagtgaacaagaagatctcattgtgtggatgagaaccgcagcattgccaacatttagaaaactttacggaaagatagagtctgacctcgagatgggtgacaccatacacgttaagctgaacaacaactacaacacgtacagcttcaatggaaagaagaagcttgttttgtcaaccactagttggctgggtgggaagaacgatttccttggcattgcttacctgacagttggcgggatctgtttcattttggccctcgcatttaccatcatgtaccttgtgaaacccaggcgtcttggagatccgtcctacttgtcatggaatagaaatcctggaggtcggtaacaagcttggaaagggagagagagagctctaatctgcgtgtgtaaatcttatccatccatgtacacatacaatgtaatttttgcttacatactatgtaatccttgcttgcaaaatggtttcttcggtgagagcttaaatcccacataatactttgttgttgttgttccaaaccagtctaatatattacttttgtccccaaaaaaaaaaaaaaaaaag

SEQ ID NO: 112 - DNA, 1090 bp, Arabidopsis thaliana
  misc_feature (1)...(1090): n = A,T,C or G
ccacgcgtccgcttcttgagaaacctcctctccccaaaaacgacgtagtttcacatttctcgacttcttgaatggagtttgaagacaacaacaacaacaacgacgaagagcaagaagaggatatgaatcttcatgaggaagaagaagacgacgacgccgtttacgactctcctcctctctctcgtgttctccccaaagcctcgacagaaagtcatgaaaccaccggaactacttccacaggcggtggcggaggattcatggttgttcacggcggtggagggagcaggtttaggttccgtgagtgtctcaagaaccaagcggtgaacataggaggacacgcggtcgatggttgtggtgagtttatgccagctggaatcgaaggtaccatcgacgctctaaaatgcgccgcttgtggctgtcaccgtaacttccaccgcaaggaattaccttacttccatcacgcgccgccacaacatcagcctcctcctcccccgccagggttttaccgtcttccagctccggttagctaccgaccaccaccgtcacaagctcctcctcttcagctcgctcttccccctccacaaagagagagatcagaagatcnnntggagacgtcttcagctgaagcnngannnnnnnttnnnnngangcatangactaagtttacggctgagcaaaaggaaaggatgttagctttagctgagaggattggatggagaattcagagacaagacgatgaagtgattcagagattttgtcaggagactggtgttccgagacaagttcttaaggtttggttacataacaacaaacacactcttggtaagtcgccttcaccacttcatcatcatcaggctcctcctcctccaccaccacagtcttcgtttcatcatgaacaagaccaaccatgaatcttgaatttctttgatcactagggttttaatttagcttaattaattacttgagaaatttgagagacaaggtttttattgtttaatttatgtacccattttcctctttgatgatgatgttgatgatgttggtgatgatctttaatttctggttaattatgttttgcattagtagctta

SEQ ID NO: 113 - DNA, 1090 bp, Arabidopsis thaliana
gtacgccgcaccgtagcgaccaattgaatccacgaggaaatctcagtaaatactatggcgaccaacgaacccgagcacgagcacagagacgaggaagaggccggagctaacgaggatgaggacaccggagctcaggtcgctccgatcgttaggcttgaggaggttgccgtcactaccggcgaggaagacgaagatgccgtccttgatctgaaatcgaagctttatcgattcgataaggatgcgaatcagtggaaggagagaggagctggtactgtgaagttcttaaagcataagaacactgggaagattcgtctcgttatgaggcaatctaaaactttgaagatctgtgctaatcacttcgttaaatcgggcatgagtgttcaggaacacgttgggaatgaaaagtcatgtgtgtggcacgctcgtgactttgctgatggtgaactcaaggatgagcttttctgtatccgatttgcttctattgagaattgcaaaacatttatgcaaaagttcaaggaagttgctgagtctgaagaagagaaagaagagagcaaagatgccgctgacactgctggccttcttgagaaattgactgtggaagagacaaaaacggaggagaaaaccgaagcgaaagctgtggagacggcaaagactgaagtgaaagcagaagaaaagaaagagagcgaggcagagaaatctggtgaagcaaagaaaacagaagaaagtggtccctcaacataagaagcgtcatcatttaagttgccaaatcctggcgaggtaattaagcctcgaaatgttttgatgcatcatgagtctaccattgtcttggcactatctatctatacatgttttgtcgagtcatatcaagtggttgggggatcgcttggggtcgggttttactgaatgctgagtcgttatgggtctaatagtttttgagtctaaagtgtcgggtgatatgagagatttgggtgaaatattttttcatgttggttatctgaaagagtacattggtttcattgttttaagttttctcatggatcctttttggatggtcttattttgaggatacaaatgtgtttgtccatggaca

SEQ ID NO: 114 - DNA, 1089 bp, Arabidopsis thaliana
  misc_feature (1)...(1089): n = A,T,C or G
tttttttttagacaagaaaagacggagatgtttattagcacagcgcggtggaactatctttccgcgctctcagaaattcaacactgaaagaataactctcgcttctttttctctttactattacatgattgatacatccaccaagacaatgactaaagagatagcctttctctattcaacttgtgaaaggagagacccttttcacgtctctcattccctcattcgttctttgtctacttacatgtacactctctcctacatcctttttcccattcttgcaaatcttctggctactccgaatatcaccgcctttgtcaacagccctttgtccaatgtacatgcaagtgcaatcgcccctcctaccactagtatctttggtatgtttttccccgttggcttgtctcctgtaacctctgctatcgaacccctctcattcatgaactcctctgcactcactttggtgttgatatgagccattatggcacttggggataaacctgctcccgctgctttggccctctgatatgcacgtaggcctggctcaattttcttgactgcaccccacataccctgtctcaccccgagctttgcaatctcccagggtattcccatatcttcatggtgaaatagtagtacctcacatgatgtcatctcaccatcgcctcttttcgattcaactgcacggatgcnncagcttgnatagtacaagtcgactcgccttggcttgttttgtcttggtacagatgggtattgtacccccttagtaatgcagtaaaagactcggccagcatcccatatacgacggcctataatatactctctgtcgctacaaaagaaggggaactttcggacccattgcacaaccatagtgcccgtgtcctcgcaacgctcgagagtagaagaatacaaaagcatatcatcccacttggaacggaactcatcatcccaaaagaagtccctgaccatctcgggagtggcatcctcaaacacagttctgctacggtactggggaggcccattctcaggatctcgcctccaagcttgatatgagaaggttggggttgatcggtccatcatttgaatccaaca

SEQ ID NO: 115 - DNA, 1088 bp, Arabidopsis thaliana
ttggggcaacaagcttctcttcttaccggctgccaagaacatgtctatgcttgtggttgagtcgagcccatggaatgctaatgattttgggatcccgtacccaacctacttccacccagcaaaggactcagaggtttttgaatggcaagaccggatgagaaacctggaaaggaagtggcttttctcgtttgcaggagccccacgacctgacaatccgaaatctatcagagggcagatcattgatcaatgtcgaaactcaaatgttggcaaattattagaatgcgattttggggagagcaaatgccatgcaccaagcagcattatgcaaatgtttcaaagctctctcttctgcctgcagccacagggagactcttacacccgaagatcggcatttgactcaatgcttgccggttgtataccggtcttcttccatccgggttcagcctacacgcaatacacgtggcatctacccaagaactacacaacctactcggtattcatccccgaggatgatgttcggaagagaaacataagcatcgaggagcgactcctccagattccagccaagcaggtcaagataatgagagagaatgtcatcaacctcatcccaaggctgatctacgcagacccgagatcagaactggagacgcagaaagatgcatttgatgtctcggtacaggctgtgatagacaaggtgactcggttaaggaagaacatgatcgagggccgaaccgagtatgactacttcgtggaggagaacagctggaagtatgcgttgctggaggaaggccaacgggaagcagggggccatgtgtgggacccgttcttctccaaaccaaagcccggagaagatggcagcagcgatggtaatggaggcacgactatttcagcagatgcagctaagaattcatggaagagtgagcagagagataagacacagtgaaaagagacagaaaccacattttgttacggttttgatatagttttcggttactatttatacggacaaaaaatgatttatttttgttgtattggtatcaaatgtagtttctccagtttcatagagataagtttgtttgtatcaaaaa

SEQ ID NO: 116 - DNA, 1088 bp, Arabidopsis thaliana
tttttttttttttttggttgaaagttgaaacaataaatctatagaaaacatccacaaaatatttttgttacaaattcacatgaatataaataaataacacattaaagactttcccaataattaaaaaaaaaacagagagatttatccacacaaagacaaaccaaattgaaaaaaaagaatgaaaaataagttttttttttttgttcctttccgtttcttcctttcatttttttgttacgtacaaagatgttttcatacaagagaagtaatcataccatcttgaaaacaaatcaaggctttggtggttcagccactggcgctgtcgtcgttgtctccggttccttaactggagtttcaaccactgccggagccggagtagcctcttccttcttctcctctacctctggtttcttctcctccacgaccgcggtttcaggggtctcgcctttctttgtctcttcaacaatctcctctttctcaccacttgttccttcggttttggctggttcttcagttttggcaggttcttcagctttcacttcctccaccggtatttctttagtcttcacctcctccgggaggaaaacagataccttctcgaatatgaacgtgaccggtcctgcgacatagccagctccgaagctagacgaagcctcactcaccgcttttgatccggggaattcaattttgactagctcctcgaggtacttctgcacagccgctgagtttttcttcaaaccagccaccttagggtctctcaccaaagccttgacttctgcagacgtggcttcataggtttccacgacctttggttggagttctgtctttttctcctcaatttccttgttgattgtttccttagattcatcaaaggtcttggtagcttcagcagcagcagccttcttagcactatttttctcgaataacttcttgaattttggaacaaccttggaattccagtaacccatctttttgttgtttaatctaaattaaacttctcaacgtgaacaaatttgaaacgataaatctctttagagatctctcctcgtatttgatctgttcttctacctgcccgggcggccgctcga

SEQ ID NO: 117 - DNA, 1087 bp, Arabidopsis thaliana
gcccttttttttttttttttaaaaacttatttatttattgatttaagaaacgtaaacagagaaacaaaagtctagtagtctcgtaattccaaagtttcacaaaactcgacatcctttccaaatcccacctcaaacatgtacataaacgcgtttagaacattgtggtttgaaattattttctcaatgtaactcaaacatgtaacgaaagagaggggacaagacaagagggagaagatgctgagcttgtgatttgtgtatgatttccggtttagatatgaccggcccaattttgggagctatcgactctaggcattttggtaccctctctcttagtctcagcgtcaaccttgaaggttgcaccacacacgtcacctgagctgtccactctcggcactggcttcaactcgttctttgggtgctcaaagctcctcaatccacccgacgacgtaaagaaacaacctttagggaaaggaccataagatttggcgcaacctttcttcaccatctcggtgttatcagaaaacacaaggtgcccttcagcatcggttccccagaagaacggcacactcccatcggcgtcagcagcagcaaagacagttttcttgacgctatcgaagagtataaacgcaaactttccatggaaatctctaacaactttgtccacagggtaaggacctcgatcacgtagtgtcctgtaagcctcaatcacaatgatggcctcgtttgtgattttgttcagtccatactgctgcttcagaaacggtaggttctcaatgtgtccttggaagagacagaaaatatcatccaccacagcaaataatctaggaacacgaggatcaggattatcaagagagtaagcaacaaatccagaagatccgaagttaagcgtgacggagttgggattcacggaagcgaaatgagtagcgagagatccatctttcaacgcgaaagcagactcagacgagtgtggactctgtaaagcttcagggctattcgccaccgtcttctcaaacacagcgagcatttttctcagtgatgattttctcgggaaaataaaatttgcagaaagaagaaaacggacgcgtgg

SEQ ID NO: 118 - DNA, 1085 bp, Arabidopsis thaliana
ttttgctctctctgccttcttgactttcaaaagactctttctttcttttggattgattttggattctagggctctctttcttttagtgggtttttgttcttgttgtggtctctctgatgattactgaacttgagatggggaaaggtgagagtgagcttgagcttggtctagggctgagtcttggcggtggaacggcggccaagattggtaaatcaggtggtggtggcgcgtggggagagcgtggaaggcttttgacggctaaggattttccttctgttggttctaaacgtgctgctgattctgcttctcatgctggttcatctcctcctcgttcaagtcaagttgttggatggcctcctatagggtcacacaggatgaacagtttggttaataaccaagctacaaagtcagcaagagaagaagaagaagctggtaagaagaaagtgaaagatgatgaacctaaagatgtgacaaagaaagtgaatgggaaagtacaagttggatttattaaggtgaacatggatggagttgctataggaagaaaagtggatttgaatgctcattcttcttacgagaatttggcgcaaacattggaagatatgttctttcgcactaatccgggtactgtcgggttaaccagtcagttcactaaaccgttgaggcttttagatggatcgtctgagtttgtacttacttatgaagataaggaaggagattggatgcttgttggtgatgttccatggagaatgttcatcaactcggtgaaaaggctacgtgtgatgaaaacctctgaagctaatggactcgctgcacgaaatcaagaaccaaacgagagacagcgaaagcagccggtttagatctcttttcgacgttacggtgttacaggttttatattttggggttttgcaagtctgagatacttctgaagcaagcataagctagattgatcttatatccagtttgtgtattttcttggttcttataatggtttttactggttttctttagttttttttttttgctgtcttttaattttcggttgcgatttcactatatactatggatggaagagaatgctctttata

SEQ ID NO: 119 - DNA, 1084 bp, Arabidopsis thaliana
aatgtttatactttggtggcaaggaagccttccttcgatctcccaacagcttgccctaattgtcttcctgcttatatatacctgaaattagcccagctaccttttgaacttgcgttcaattcaaccttccctgattcagatgaactgccgtactttgaaagtgatacatatgttgcatataacaatgaagatggaggagtaattgaaaaactgaagaaagatgggattgttaatctggactctcagctacagtctctttcggattatttatctttgaaggctcttattgtgtcttggctagaagaagcgcttacctatgagatatgggttggtaccgaggggatatctacatcgaaaatctactattcagatcttccttgggtgatcagcaaggtcctgttttataagcagacatacttggcaaagaaccgtttaggaatcaccaaagagaacgcagagcaaagagaaaaacagatatacaagagagcaagtgaggcatatgaagctttgtcgactaggttaggtgagcagaagtttctctttgaagacaggccatcgagtttggatgctttcttactctcgcacatactttttataatccaagcgttaccagttacatcagtgcttcggtgcaaacttctggaacatagtaatcttgtgcgatatgctgagaaacttaagtcagagttccttgaagcctcttcttcatctccttcacctccacttcactcattcccttcctcatttccaagaaagagttcgaagccaaagagcaaaccaaaggtagaaaagaccgaagaggagaaaaaatttaagaaaagagcaaggttctttctagctgctcagtttctagctgtcgtcatttacgtatcagtgatgggaggaggtagttctgatgaactggagtatgaagatgaagatgactaaactaaagcttttcttattaaatggaccggtaactctcaggcgaactctctgagactaagataaaaacataaccagtaatctctacgcttttttcttcttgaactcttagttatggagaggatacagatgtgagatttagtcacattataatggtttt

SEQ ID NO: 120 - DNA, 1084 bp, Arabidopsis thaliana
ccacgcgtccgcatctttcaatctctcttgattccaatccattcttcttcaagtgccgggttctcgggtcggatcttctaagtctagctagggataatggctactgtcactactcatgcctcggcctcgattttccgaccttgtacttcaaagccaagattcctcaccggttcttccggtaggttgaaccgcgacttgtcgtttacatcgatcggttcatcggccaaaacgtcgtcgttcaaggttgaagctaagaaaggagaatggttgcccggtttggcatcgcctgattatctcaccggcagtcttgccggtgacaatgggtttgacccgttgggtctagcagaggatccagagaacttgaaatggttcgtccaggcagagctggtcaacggacgatgggctatgctcggtgtcgctgggatgcttttgccggaagttttcaccaagatcggaatcataaatgttcctgagtggtacgatgctgggaaagagcagtattttgcatcgtcgtcgacattgttcgtgatcgagttcatattgtttcattacgttgagatcagacggtggcaagacatcaagaacccgggaagtgtgaaccaagaccctatctttaagcaatacagcttacctaagggtgaagttggttaccctggtggaatctttaacccgcttaactttgctcctacgcaagaggccaaggagaaagagctagcaaacgggaggttggcgatgttggcattcttagggtttgtggttcaacacaatgtgactggaaaaggaccatttgagaatctgttgcagcacttgtctgacccatggcacaacactattgtccaaaccttcaactaaagagtgaagacagacttatgatctcatacctatctatcttccatcactttcatgtctgtctgtgagtgtgtttcatcttagagttcttggtttttgagcttgaattattgttgaaccgttgtagctccatgaacaaatttggaatcttcaatgtacagaggaactaagttaatcaacattgttgtactctttaatatctaaaaaaaaaaaaaaaaaaaaaaaaaaaaaaaaa

SEQ ID NO: 121 - DNA, 1083 bp, Arabidopsis thaliana
caaaaattgaacccgttaaccggcgacccgaaacaatgacccggtccgtcagtttccctctcttcctcttcgccgttgtactctccctctcttcttctctcctcgccgacgatcccaaaccaatccgccgtgaggtctacgaaggaggtaagatatacgacatcagccatcgttacacgccggagattccagcttgggaatcttcggaaggattgggaaagacgttcctgcgattagccgcgagtatgaagaatggatcattcgctaacgtatcggagatgaaactatctgttcactctggaactcacgtggatgctccaggtcacttttgggataattattacgatgctggttttgatactgattcgcttgatctccaagtcctaaatggtcctgctttgttggttgatgttccgagagataagaacattactgctgaggtaatggaatcacttcatatacaaagaggagttcgtcgtgtgctctttagaacatccaacaccgacaagcggcttatgtttaagaaagagtttgattcaagctttgctgggttcatgaccgatggggctaaatggttggttgagaatacagacatcaaacttattgggcttgattatctttcatttgctgcttttgaggaatcacctgcaacacacagggttatacttaaaggacgggatataatcccagtggaagcgctgaagctggatggtgtggaggtaggaacatactcgcttcattgcttaccgctgagattagttggagcggaaggagcaccgacaagatgcattctcatcaagtgattcagttcttcttcttcttcttctgtgtaagttgttcagtataccaaactgataatgaataatatgcttcttactttacaagatctcagaacccatgaagcagatgtgatgattcagttgtaaaaggaagcatacctttataaacgtgtgaatgtattatgtatgacagtatatttgtaattctgaaggacatgataataaacctagactgaaacaaacgaataatataaccacttgcagtgaatgcatgaatctgattaaaaaaaaaaaaaaaaaaaag

SEQ ID NO: 122 - DNA, 1082 bp, Arabidopsis thaliana
  misc_feature (1)...(1082): n = A,T,C or G
ccacgcgtccgatgggagacatgtgggcagagctctgattttgggtggatgcagatcgtggaacctgtaatgaagcagtacactgaatcgactgatggctcttccattgaaatcaaagagagcgctttggtttggcaatatcgggatgcagatccaggctttggttctttacaagcgaaggaaatgctagagcatttagagagtgttctagctaatgagccagtggcagtcaaaagcggtcactacatagtagaagtcaagcctcagggagtgagcaaaggatccgtgtcagaaaagatattttcatcaatggccggaaagggaaaaccggttgatttcgtgttatgtattggagatgacagatctgatgaagacatgtttgaagcgattggtaatgcgatgtcgaaaaggttactctgtgataatgctctagtctttgcatgcacagttgggcaaaagccaagcaaggctaaatactacttggacgatactactgaagtgacatgcatgcttgaatctctagctgaagcatcagaggcttcaaacttttctatgcgtgaacttgatgaagccctttgatttggaaccagatcttttgccagatggctaaagaagaggttagacagacaaagacaaggaatagaagagactgggagtttgttggtctgtatgtgtttgtcagattgaaagaaanaaaagaagaaannnntagtgaaagagtaataatggnnaaaaaaanaannnntgatgtgaagaagctttgttatttgcagagcaatcaatcaaacaatcaaaggaggaggaaaatagatgtgtttgggttcatcagggaaatgtgtttgcaggatgttgaagttaacaacaagcaaaagcttttcctgatcttttttttttaatattcttattactattattattgttatttgtaattggatgatctcttgaggatatcaaatttggattcggctgtttattggatctgaacgaaaacgaaactgtgaagaaaatgtttgtaaagataacgttgcttgtccatcgttgatttttttctttctatttattattatgcttttcttaaaaaa

SEQ ID NO: 123 - DNA, 1081 bp, Arabidopsis thaliana
  misc_feature (1)...(1081): n = A,T,C or G
ttttaaaaatcagctttaactagaaacaaattataaacaccaatgctgattcatagtctattttaaaaactgtaaatatattttctttttcctgatttcctttctttttttttttgtacaaagaagaattcaaaactatgagaagaaaannngaagaagaaagttgattcgaaatctgaaaagcgaaatgggtaaannngaagctctcaatcttcaacctttgggcctctgtataacgctccaactacgttagtatgatcttctggattatcatccctttcttgcagccatgcataaccttccttctcctcttcactgctcaaaacgtcgtcgtcctctgatgagagtttgtctaaagggaattctaggaaataagtgcaatgtctgccttctggattgcagtaaggaggtcctagcacgtctagcaccgcacatgctgttatagctgtgaaccgatgcatgttcccgccatcttccgggtacaaaatcgaggcgttacatggcgcggtgaatgttgaatccaccttcaatttcgctagcctggtttttgaatctctcattggagcatcaaccacccaatcatatgacttgatgtgcattgtaccaaagagaagcttactaaaaactgtcatccctggatggttatgaagaggaataacaccagaaggtggcaaacagaaaatcccaatcgagaattgatcacactggtgtagatgcagatacgttattggtggcgaagaccgagcttcgactccggagtttggtcggaaatacggcatggtcggagttaaaccgacatcctctggtttcatatcgtcaagaatctctcgtagctgttggattttatcttcagaaggaataacaccaggaccaccattagagaacacttccttgcaagtattaaacaaccgccgcaccgccgtgatcccatccgccggggaatcaatcttcttccgtcgccacgtcatcatcatcttcttattcttgtttttgttcttcttcttcacagaattgggattagacttgcattgattcttactagaaatcaattccaaaacctctttctctggtttcatctcaa

SEQ ID NO: 124 - DNA, 1081 bp, Arabidopsis thaliana
tattagtctctttgttttcttgcttctacattacagaaattaaatggcttcttttgtgatgggatacttcttattgttcgctgttgctttcatgtgtttggatgcgagaacggacaaaacgcaagattatacgtcgtttcagtaccataaaggagctctcctcaccggagacgtttccatcaacctaatctggtacggtaagtttaaaccgtcgcagcgtgcaatcgtaaccgatttcgttgcttccctctcgtcttcccggagatcgaccatggctcaaaatccctcagtcgccacgtggtggaagacggtggagaagtattaccaattccgcaagatgaccacgacacgtggactcagtctctccctcggagaacagatcctcgaccaaggatactcaatgggaaaatctttaacagagaaaaacctcaaagacttggccgcaaaaggtggccaaagctacgcggttaacgtcgtgttgacctcagctgacgtgacggtccaaggcttttgcatgaacagatgcgggtcacacgggactggttccgggtcaggcaagaaaggatcaagattcgcttacatctgggttggaaactcagaaacacaatgtccaggacaatgcgcgtggccattccacgcgccggtttacggaccgcaaagcccaccactagtggcaccaaacaacgacgttggtttagacgggatggtgattaacttggcgagtctcatggctgcgacggcaacgaacccgttcggagatggatattaccaagggcctaaaacggcaccgcttgaggctggatcggcttgtactggagtctatgggaaaggttcgtatcctggttatgctggagagttacttgtggatgcaacgaccggtgggagttataacgttaagggactgaatgggagaaaatatttgttaccggctttgtttgaccctaaaacagattcttgctcgactctgttttgaatacctattagtatacgttagatacgatattcttttatttatactttatatattcgtttttgtaatcttctttaatcagtatgtaatgaaattatttgttattgacta

SEQ ID NO: 125 - DNA, 1081 bp, Arabidopsis thaliana
tttttttttttttttagtaaaaacaaattttactactttcaactttgaggaagttacaataaaagaggatttgataagtttattcctaatagcataacaatgtccccctccagtggaaatcgttgaaaataaaggactttattgatcgaaataaaaaagatagtgggtttcttttgaaatattattaataatggtcgttgcgtgtaaatttggaggcatgtttctgtataatctgccatgcttcagtgacatgcttctcttccgttaacggtgcaccaacagcaaatcgtaaaacgaattttccagatagagccgtgtgagagatgaatatcttgccagtggagttaacagccgcaagcagttcacggttacgttcgttacattggtcttcatcgccgtcaactggcgcaaggcgaaagcaaacgagtgaaaagtaccgagtagtgacaacctcaaaacttggatcttgagctacataatcttcaaaatgcttagcgagattgacatggtctcttataaagtttcttaagttctcggaaccatagagccgtaaaaccatccataacttcagtgatctgaatctccgagagagagaaatttgccaatctttataatttacgaccgtatcttttttggaaaccttgaattctagatactcgggatttgttttgagagcatcaatgagagagtatcgatccttaacccaaagaggtgaacaagtttgattagcaaataaccatttatgagcattcatgttaaaggagtctgcgttttcaatcccgtcaataaattttcgatattctggacatatacatgcattccctgcataagctgcatccacatgcaaccatatcccatatttctttgcgatgttccccaatgggaccaaaggatcaaccgctgctgaagacgttgtgccaacagtggcacaaatgaagaaagggataaaacccttagcgagatcatgagaaatagcttcctcaagtgattctggaggcattccatagtttgtggaagaatcagttttgagcagcctaatgttttcttcatgtatcccaccaatcagacaagcttttcggaa

SEQ ID NO: 126 - DNA, 1079 bp, Arabidopsis thaliana
  misc_feature (1)...(1079): n = A,T,C or G
ctttttttttttttttttcgcaggtaaattgtttcaaacaatctcaggaagagcattacacataatcattatctgtcacacaatgcaatagaaaaggtacaaaagcacaaaaaacttcataataataacaagtctcattttattggaatggtctgagaaatcaatatgtagtagacaaggttagcttttttgctaagcatagagttgtcttgaggtctaaacaagtctttcaatatatagctactcttccacctaaagaagctttctcatgttccagtgacatggtagtaccatgtcctgccacattacgctatgttcttgaactagttctcagttccaacaacagacgcttcattgttgtttgaagattttacgtttttcgcagtgtacatatgcaccggtggaggcaaaagctcttcttgaatagccaaccaaccattcttccctctcgcgccgcctctaatataataagcctctttgaaaccattcttgatcagcaattcagctactttcgacgagttaccatcaaaattatcaagaacacaaacaactgtattctcagcatcagagaagcttcctttaannntcgtcaaaaacccttcttcatcattctcactaaacnnaanctgaacagaactcttacccaaaaacttaagattcggtgatgctaacaaagccaaagtcttgacatctctaatatccaaaagctgagaatcagattcattcttaagcttacgaaacgcgttcatggcggatattggtttatacttcctcaagtaaaacatcacagctggataaacaacaagataggtaaaagtacatcccgctacgaaaaatggatacttgttgaagaaattatcaattgtgaccaaaattgactctaaatcgatttttccagaagatgggtctgatgaaattgagtcgaatgattcagatgcgagaacaggggaagtgataattagttgggaaatggttacagagagattggttttggttaggagatgtattggaggttgttttgtagaattttgaatgggttttgggatttgagaagttgaacaaggtttggttaggtttcg

SEQ ID NO: 127 - DNA, 1078 bp, Arabidopsis thaliana
  misc_feature (1)...(1078): n = A,T,C or G
ataaaacaataagcgacgtgcggcgatggaatctcacggttccggtctccggcgagttctgttattgtcgttctgtgtcgctgggatctgggcagcttacatataccaaggcattcttcaagagaccttgtcgacgaagaaatttggtgaagatgggaagagattcgagcatcttgcatttctgaatttggctcagaatgtaatctgcttggtttggtcttatataatgattaagctctggtccaacggaggttctggtggagccccatggtggacgtattggagtgctggcattactaataccattggtcctgctatgggcattgaagctttaaagtatattagttacccagctcaggtccttgcaaaatcttccaaaatgattccagttatgctgatgggctccttagtttatggcataagatacactttgcctgagtatctttgcacctttcttgttgccggaggagtatctatgtttgcccttcttaagacaagctctaaaaccatcagcaagctagcacatcccaatgcaccccttggttacgggctttgcttcttaaaccttgcctttgatggattcacaaacgcaacccaggattccattaccgcaangtaccccaaaactaacgcatgggacataatgctgggaatgaatttatggggaaccatatacaacatggtctacatgtttggattgccacatgggagcggatttgaagctgtgcagttctgcaagcaacaccctgaggcagcatgggacattcttatgtactgtttatgcggtgcagtaggccaaaacttcatcttcttgacaataagcagattcgggtctctagctaacacgaccataaccacaaccaggaagtttgtaagcatcgtggtatcttcagttttgagcgggaatccgttatcttccaaacaatggggatgtgtgtcgatggtgttcggtggattgtcttaccaaatttacctgaaatggaggaagctgcagagaatgcagaagaagaaaaaggcctgaagctgagattggggatcaaaatatttaattcttcaagaaaattgtttttgatttgga

SEQ ID NO: 128 - DNA, 1078 bp, Arabidopsis thaliana
  misc_feature (1)...(1078): n = A,T,C or G
ttttaagagtttcatcaccatctcaagatgatcattttcaacctttttattcttctacaaatccggcaggaaaatgggaaagatcagtagttgcccactcaaaccatgaaccaagcagagaaaaaacagagtacgtagaaagaaactagtttaaaaaaactattgcaacttcttcttccatctcagtttcaaggcttgagtgcgagagccaatccaactttagcactcttgtcaattgactttgtgtcgacttctccagagattgtgaagaatgacttgggtttccactcgtgttgaatgagagcacttgcaatacccgcactattgacacgagccttcacagaggtcaaggggtcaagcgagtgctgtgttccaacagttatggtgctgtccttgctagataacttgtggctcacttcggctccaaccgcagtgttgaacagcgggttcacaatgtgatagtaagatgcattcaatagatcgcccttgtcgttcacagtaagggaggcaattaagtcctcctnngtgaagcttaaaccagcattgatcttggtgaaatttccagacttggtgtcaaatgaaacatcagtaccaacagnnaagacattggagccaatcacaccagagaagttgacagttgggttctgagtcaatcccatgcttgtgctgataccggcgtactcatgcaagtattgcagctcaaccttgccagaattttggtcaggaaccttgaagctgaagattgacctcagtccgggtgcagcctcatcaacggtagcggtgatcagaaaagtagaatcagtgcaaactttcaaatcagtagtaatgttctttcgcctcgactgaaaagcgacatctcccaacaataagtcacctttcttagttccggttgaggtgatggcaacaccggcaggagagaaagtggtgatactgaatttctggtcactgttgtggtctttgtacagaagatctctggcctttttgccgatttcggtgtagagaccgggacctttcaccattgttgcttatctgagaaagttggaggaagttctgaaaagtcttctctgcggacgcgtgg

SEQ ID NO: 129 - DNA, 1077 bp, Arabidopsis thaliana
tttttttaatgtaaagattttatttgttccgtgaatgagaaatgtattacacatcttcaaaataaagaaatagaagtgaatgtgtatatatcaaattatatgcatataacaaaaaaagggcagacccgagcaaggtttgccactctcacactggtacaaatttcacaacaagctctcaatttggtccaaaccagaaaaaaataaaaatgaatgatgagtgacgagtaaggcaagaacaaacagagaagaaaattcgtggagccgtgttgcctggatgaataatgtaacctgagtacttttatcgactgatattacatatcccagagtaaagaaaaagcacaggcgagcgtattcttgattacacgaatgaagtcaagtgcatcatgtttggcttgatcttaccggtatccaccaccataggattgttgagggttgtaaccaccttgacccatcatcggattgtagttattgccaggcatgtttgggctaggtaccatccctgggttttgtggttgcatcggatagccttggccatatcctcccatgttcatgttcatgttcatgccgggtcccattcccatacccatcggttggttttggttcattccggcccccatacccatacccatgggttggttctggttcatacctccgtagctaccaacacccattcctccgcccatgggcatgccagagcctgtcattggattaggtggaggtctcatagcagttgcaccagaacgccctaagccagtgcctgatcccatggctttacccatattgatagtcgatgttgctggtgtgtttgtttgtttctccagccgtttctctctcctgttgatcgcctcgaagtcaactcctatgtctgccaatggatttgttttagatccagatatgttaaagttaacaagccccctgctcaacgtgtctgcccagactgatgattttggctcaaactttttctgaggcggaggaacaatctcaattgctcctgttaaaggtgtgagatctggatgagatgatgatgacgtcaaggagttgggcgtagcttgcgagaacatgtctcccatgacattg

SEQ ID NO: 130 - DNA, 1077 bp, Arabidopsis thaliana
ttgtgatgtaagaaacatgaccgctgaaactttggagattttgagtaataaggagattatcgctgttaaccaagacccacttggtgttcaaggaaggaaaattcaagccaatggagaaaatgattgtcagcaggtgtggtcaggacctttatctggtgaccgtatggtagttgctctctggaaccgttgctctgagccagcaactattacagcatcatgggatatgatcggtcttgaatctaccattagcgtttcagtaagagatttgtggcagcacaaagatgtaacagagaatacttctggctcctttgaagctcaagttgacgcacacgactgtcatatgtacgttctcactccccagacagtatcacactctgatgtatagttctttattgtgaggcattcaaatcccaaagaacagagattgcctttgtgtttctgtatactcgtgtatcttgtaaaacgtgaaacctgttgttacccaatgcacgaatcgatatacaaatatgaaaaaaacaaattcaaaacaagaaaacttgcaagttacaacaaatagaaccattaataatacagtactcacactcacaacgacaacgtacgttctcgtttattattcgatccacatatatacgccaaagtaaatactaacaaaacgacatcgtcccattatccgcagcaattaagagctttgtttcttcttatgggcacttgcggcgtccaccgtgggtggtgaggctagcgtagcactggcacttgtcgtagtttccgtacgtacccggaggcacacagttgcacctgtagcagcaagtcccgcacgctctgtgacacagcctcggcctcctcgaaagcctgcaccgtgctacacacgcactcccacaatcgatcttctttgcgtaaccatttttcttctgtgagttttcgacatcagcctggacgagttggagaacaagaagagatatgagaagagaagcgataagagcttttgaaatagccatgattctccaaggagagtttatgatgagagaacttagctcaaatcagactgtaatgataaatgtagtttaagcggacgcgtgg

SEQ ID NO: 131 - DNA, 1072 bp, Arabidopsis thaliana
cgacctctcaaatccaagaacggggcttttgtcttcaaaatgaaaagtttgcagagaaaaagggggagagggagagagtctcagacaataccatattaacaccaaagaacgagtttttggaagcaaaagagaccaaccacacttactactgtcagggccaaaatcaaaacccttacctggaaaagatatatatccattttagttatcaaatctaaaattgagtctctctacatcctaccctcgcaccaaaaccaccacccttgattcctacatgcatagccatgtctctctcctaattgtatattttcaccggcttctcgtatgcgtgtcggttctgatttgcagcataagcccttttaggagcattatcaatgtgctccaacccaagatactgctcccacgcaccgtatacatctcttctctgaaagcgattataaacaacatctgtgtccagcaagtaatcaggacgtcccattgaaaacgatgcaaacttccacttggcaaagtcctcatcagggacatggagtttcttttggatacgggtcttgatttcttctaaagtttcaccttcgtggattaccaaaaagaagggttccccaaaattttgaacttgctgattttgtccggcctctttagtaaaatgatatacgtgaattaacctatcattgggaccaatattcttctcttcttcaggtatctcctctgctcgtaaagtccagtactggtcattgatgttttcaattcgttcagtagatggaaagatcttgtagatcttgtggaaaaagacctcaagtaacctcagttctgcatcttgatgcgaaagctccacctttgttttcagttcgttaataacatctccgaccgtgctttgtttaggtagtctgatattgtggattaccacttcttccttcgtggcatgatggaaagcaacttttaaggttttaagaccttgtaattctggaagagggatgtccagaacttcataatacaaaatgtcagacgtctgattgtagtgaactaacatatctgacaaatggtctactccacggtacctgcccgggcggccgctcga

SEQ ID NO: 132 - DNA, 1072 bp, Arabidopsis thaliana
cttttttttttttttttttttttttttttttttttttttttttttttttttttttttttttttttttttttaaaagtaaggtacatattatttctttgttcagaagaaagcaaaacaaggacaatggagatattacttaacacaaatacataaaaaggtccattttagtggttggtgaaaatgcgattgaaaggtataagaagatggaaagtaatccactgtggacaaactcagagtagggaggagtcaaatcaactgatccgacggcagatagtgattccatcaccaacagggagcatacagatctcgatccgagggtcagcagcaagagccttgttaagctcaagaacaaagtctctgtagtaacgaacgtacttcctcattggtgcatcaggaggagccacgacagaaccattccacagagtgttgtcgtagccaatcactcctccaattttcacaagatcgatcaaacgcttgtggtagttgatgtagttgtctttgtcagcatcaacgaatataaagtcatatgttccatggttcttctcgtcagcaacgatttcatcaagaacgggaagagcagggccttccctgaagtcgatcttgtgagcaacgccggctttctcaatgatcggtaaacccaattcgtaattctctctgttgacatccatagccagaattttgccgtcttcagggagagcaagagcggtggcgagaagagagtagccagtgtaaactccgatctccattgtgttcttggcgttaacgagcttgataagcatgtttaagaactgtccttcatcagctgatgtggtcattatgttccatggatgttttgctgtcacttccctgagttccttcattgattctggttctctaggatacacacttgtctccagtatatactggtagagatcatcgctctgtaagagactcttgtgaccaacttcttgatgtcgaagattctgagactgcttctgatcttctccattggtcgatgatgtcttcgttgcttctgttgttgtcgtcgccatttctctctctttctctctctgtgtttttgtcttcttgggtg

SEQ ID NO: 133 - DNA, 1071 bp, Arabidopsis thaliana
ccacgcgtccgacgaaaccctaattttgcttcctcatcttgttcagaaaattactcaaattcctattagattactctctcttcgacctccgatagctcacatggcgtctcgaaactatcggtgggagctcttcgcagcttcgttaatcctaaccttagctttgattcacctggtcgaagcaaactccgaaggagatgctctttacgctcttcgccggagtttaacagatccggaccatgttctccagagctgggatccaactcttgttaatccttgtacctggttccatgtcacctgtaaccaagacaaccgcgtcactcgtgtggatttggggaattcaaacctctctggacatcttgcgcctgagcttgggaagcttgaacatttacagtatctagagctctacaaaaacaacatccaaggaactataccttccgaacttggaaatctgaagaatctcatcagcttggatctgtacaacaacaatcttacagggatagttcccacttctttgggaaaattgaagtctctggtctttttacggcttaatgacaaccgattgacggggccaatccctagagcactcactgcaatcccaagccttaaagttgttgatgtctcaagcaatgatttgtgtggaacaatcccaacaaacggaccttttgctcacattcctttacagaactttgagaacaacccgaggttggagggaccggaattactcggtcttgcaagctacgacactaactgcacctgaaaaaattggcaaaacctgaaaatgaagaattggggggtgaccttgtaagaacacttcaccactttatcaaatatcacatctactatgtaataagtatatatatgtagtccaaaaaaaaaatgaagaatcgaatcagtaatatcatctggtctcaattgagaactttgaggtctgtgtatgtaaaatttctaaatgcgactttcgcgtactgtaatgttcggttgtgggattctgagaagtaacatttgtattggtatggtatcaagttgttctgccttgtctgcatttaacacttgtgttttagatctgttata

SEQ ID NO: 134 - DNA, 1070 bp, Arabidopsis thaliana
  misc_feature (1)...(1070): n = A,T,C or G
ccacgcgtccggaagagaacaagtgcttccgcgttgtgatcgttattccgctactccctggatttcagggaggtattgatgactttggagcagccacggttcgagcactgatgcattggcaataccgtacgatctctagaggaggaacttcgattcttgacaaccttaacgctttgctcggtcccaagacgcaagattacatctctttctatggtttgagatcgtacggacggctgtttgaggacggtccaattgccactagccagatttacgtgcatagcaagttaatgattgttgatgaccggatcgcagtgatcggatcttctaatataaacgataggagcttactaggttcacgagactctgagatcggtgttgtgattgaagacaaagaattcgtggaatcttcgatgaacggaatgaagtggatggctgggaagttctcttacagtcttagatgttccttgtggtcagagcatctcggccttcacgccggagagatgcaaaagatcgaagatccaatcaaagatgcaacatacaaagacttgtggatggcaacagctaagaagaacaccgatatctacgaccanntcttctcgtgcatcccgaatgaacatatacgctcaagagctgcattgagacacaatatggctctttgtaaagacaagttgggtcacactacgatcgaccttggcattgcaccggagaggctagaatcatgcggcagcgactcgtgggagattctgaaggagacaagagggaaccttgtgtgcttcccattacagttcatgtgtgatcaagaagatctcagaccaggtttcaacgaatctgagttctacactgctcctcaagtcttccactaaccactatttattgtacgcccagttctctttaatcagttaatagagtacctaagctcacacgttacttatgtatagagatgttagttatatagaaagaagaaattcatttgattgcttcctaggttcgcagaggtatgtgtgtgtatagtatacacttcttgtaaatcataatgtttatgtgcctcaagctgtaaaaaaaaaaaaaag

SEQ ID NO: 135 - DNA, 1070 bp, Arabidopsis thaliana
tttttttttttttttaacaaaagcccaaaatcaatttcacaaaggcccaaaatggtaatacagaaggaaaaaaaaacacaaagatgatcatggttcatgcatggatcataagcatttgaattggttatataaaccagaaatgaaaagagggagagagaaaaaaaagactcaagaatcagaatgaaactctgatcttattgttttgttagtaaataagatttaatcaggcgacatagtagatggagttagggagcttgaaggttctcttgggaactggacaaccagagaagctgttccattgtgcacccatcactccccaaactctgtacccaagacttgtaagccatgtcctcaaatctgctttgtattggctcacactcttcttttcatcatcttctcccctcagaaggaggttagaccagctgtggtaaccggcttcaataagattttcgacggtggcagatctgagatactctttacgagaagagatcaaaaagatcttgaaacctctctctctgatctcatggtacaacttcaccatgtgtggaaccgctggtgccttgcccgaattttgccattcctcgaacttggtcgtgttcagttgctcaccaccgaaacaaccgttgctcttgtggtaaggaatggttgagagaagagtgtcatcaatgtcaaagatccaagcatccatgccatcgcatgtcttcttctcgcaacaagtttttccgaggtagaggatggcttcatcgacggctctctccacgtcatcttcgtattgagatgaggtcatgtacttttggacgaaccatacacattcctgtggaaccaccttaaagtcccttatgttgttaagctccacgttgactctccagctctcacagtatccgtttaggttgggagctttcaaagatgtgacgccggtttggctagtcttcgtggtggttgtggttcctttgagctggctcaggatgttccagtcacgagctgagacaattccggcgaagaggaatgtgagggttagcgagagcaacaaggatctagccatgttgagacctgcccgggcggccgctcga

SEQ ID NO: 136 - DNA, 1069 bp, Arabidopsis thaliana
  misc_feature (1)...(1069): n = A,T,C or G
tttttttttttttttttttgtaaataactttctttgttttgccttttaaaattcaaaaccttaaaccatctcattcgaccttaatttgacacccttacatgtaactcctattaggaggaagcagatgattcaaatgaaaactacacgactcatgactaatggaaacacgtttctctgaaacgtgaatcatcttagatagatttaaagcaaaagaaagagatgcaaagtcccgactgaatgttccagtgaaagtgatcagtcacgttcactaatggccgtcaagtgctcgtcgatctcctctgttctcagggaacggaagagagggtcatcagctctcacaactcccacctcaatttcagttgctttgaagtcttcttgaagaacagattggagagcggatatagcagtctgtactgtttcatcatatgtgaaggcagggttttctttcattttcttctccaagaaattgactgcttcttgttctttcataccagcactagttgccttgtgaccgtaaaaatgtccagctgggtcacacttgtaaagtagaggtcctctctcttcatcaatacctagaaccatggcaactactccaaggggtctcatgtaagcatgttgtgtgtaannnngagacttatctgcaatccatttagcaagaatatnnnnaggcatctcatnnncatattggnnnctaaactcagcagcctcattcctagcttgttgtaccaatgaccttgaatcagctgtcatgccagtggctaacaatccaaggtacttggtaacagggaaaaggtgagatacactagactgatccaaaagcttgtccggaactttcttctgcgtaacgacgcatactgaatctttccctcggacaccgatcgatgtgattccagctgctttcacggctttgaaagcatactcgacttggaagagacgaccttccggtgagaaaatagtgatgtgacgatcgtaaccagcgccgcttcctctgctcatcttcttcttctcagagaagagaacaactctcttccgaaatcggagatggaatttttgcttctgtgtgatctgt

SEQ ID NO: 137 - DNA, 1068 bp, Arabidopsis thaliana
  misc_feature (1)...(1068): n = A,T,C or G
tttttttttttttttgacaagaaagttttgtttttataagctaaacgttaaaacaaaatcatcgcaattttctctaaggacacaaaaactgaacagctcttccaacagaatgataagtaaaacagaatttagataaagggttcaaagctgttccgtttagtcatcattcaccgatgaacttgcgctttttagaggtgttcatgtacggtcttataacccattcgatctctgcttcattttgttccacagttcctaatttcacctggtagagccgcaactcaaatcgaggaccgatttctttaagctcgattgattttggacctccctctcctttatcatagacatgattcctgaatgatatataatcggattgattagaaaaagtaactatacgttttgcatccagttttggagcagggaagatatgttttaagatgtttccaactctttgacccatctgagtagtaaagttgttaaaaatgagatgaggatattgctcaggcatttttccaatggatttcttgtctgaaatatcatgtcttgttaccacattaagtaatccaaagtatgcagttggtccaaatgggagatgagagataatgagaccatcaggcacaccacggtgctcatgaaccaatataacatcagtaaaatcatgggaacgagcagtttcaatgatctcagaaatgacctgactaccacgatttattctctgagagttaggaaacacaaacttcaattccttagtgaatcggatgagcggagcacttggattcctagaagttgtcaacaaaatctttggatctgcttccgtagcattngcatattcatcatcgatatgactccgcggannagctgtgttttggtcttcaagatcaatttcttgtcgaagcttggcttcgacgtttcggagctcagtaggaatcggctttccttcttgaagggcttctcttatcagcngcttctgctcatagaccttacgctcatcaccttccaagcttttcctgtagatatactctttttttaaccttacgagtctgcgttgcatcgtgattcgtcgtgaggcta

SEQ ID NO: 138 - DNA, 1068 bp, Arabidopsis thaliana
  misc_feature (1)...(1068): n = A,T,C or G
cttttttttttttttttttggttgtgtggcttgagtcacagtaacttattaatcatacttgaaatgtatcaaaagattgagacatcattgtcacacaccgataataatcaaaaacacaatctaaagatgttgtctgcaaatgtttgtgtttcaaagaagagcagatttaagagacttggttagtttctcaagctccttaagtccttcagttggcgactttgcatcacccaatagctttaccattgcactgcctacgatcactccatcagctccccatccagctatctgtttcacatgctccggctttgatattccaaaaccgactgccaccggcttgtctgtcgcctctttgatatccttcaagagcgactgaacctttccgcttacagatgatcgtgcaccagtcactccaattgagctcacaaggtaaataaatccttctgacgcatcaacaattagcttcattcgctctgttggtgtggttggtgtagtgagtaggaccagctcaatgtcgttgnngagggcttcnnnncnnagcatctcagtttccncnngaggaacatcgggaaccacaagtccctgtacaccaacagctctgatgctggacatgaacttccccaacccacgtttaagaatcgggttgtaatacgtgaacaacgaaatcggacaagatatttgtggaacaaccttatccaacatctcaaggatgctatcgaggtttgttcccctctccaacgaccttgttgccgcagcctgaataacaggtccatcagctaaagggtcagagtaaggaacacccaattcgattatgtcagaaccacaagcatcaagaactttcaatgcttcagcagtagtagagagatccggatcaccagctgtgatatatggtatgaatgctactttgccttgttttttgagctgtgtgaaagtatcagcgagaccgagagtaggagaagaggtggagagagaagccatgggagtgaatctcttgaaagaaagcgatgaatcaggaggagaagaatggcggaatccaatttgagattttggggattggaggaagaagacgcc

SEQ ID NO: 139 - DNA, 1068 bp, Arabidopsis thaliana
  misc_feature (1)...(1068): n = A,T,C or G
aaaactccgatggatcggcaaaattccgatgacatcatgagatttctcgatggaatggctagctccgacgacgttcttttcggttttctcgacgaaggaaaccagtcactggaagatttctccntaaacctcaacgccggcgaagatgacggcgacgaagacgacaataataacaattctgaagataacaaagctttttggcaggaacacgaacaacttcttcaggggacactgtataggacaagttccattgagacaaagattagacaagctacaaaagaagcgttgaaacaagttaaatctaagggtctttattgtgtttgccggcgaccagtggacggcggttgccggagttgcttacgtggcgaaatctctagacacctaagagatgtcgccggctacgattgcgtcatctctaaatctaaatggagaagttgtcaagacatccctgcaggggaacacgaatttatagagattgtggaccgatcgggttcaaagaaaagcgagatgcgagtggtgattgagttatcatttagggcagagtttgagattgcaaaaggcagtgaagagtacaaaagactaatcagtcgattgcctgaggtttacgtcgggaaaaccgagaggcttcgatctctgataaagatattgtgcatcgcgggaaagaaatgcttgagagacaagaaaatgcatatggctccttggagaaaacacaagtacatgcaagccaagtggcttggcacatgtgatcgatctagctccttggaagcttcggtttccgaggccatggagccagaaaattgggtgccggtggcgaagcctagggtttctatgttgaaccatgatggtctcttaggtggtttctctgccggtccggccactgtagcggtcgtgtgatatttttgtactatgtttttttgatgacttgnanttattaagtgattagggtgagtcatgagtgttaattatggtttctgatttgaacttagcaagaaatggtctcagcggctgtgattcgagcctctacattgtgtagtaagggacgaagatgctgttttgtgtcattggtgc

SEQ ID NO: 140 - DNA, 1067 bp, Arabidopsis thaliana
  misc_feature (1)...(1067): n = A,T,C or G
atcgtaaattcaatatatcattagaggagtacataacacagacgaccaattaaatggaccgtcatatacaaagaaagacatgaaaacacaaaatctagaaacacaacaataataacagtaaaaggatacactagtgtgtatatagtgtgacatcttaattatttttaatactctctcatcgattatatgaaaacccttcaacgtctatcttcttttgatcacctgacggtgttacagttggttctggcactgatggggtaagagatcctaacacggcaagcaccagggagacgagcagcacgaccagcgttaagtcgagaacccaaggctctcgctgctccctggatacaacgacaagcttgttggcggtcacgggtggtacgagccaagctgttgagcctctgaacgccagagcaacaccctctaggaatgaaaccgcctcgggtcaagtagttatagcattgacctaagctgnnggtgactgcgccgcacgagatngctgnntcggacgccattgganncaagatcggagacgcactccacattggaggaggcaacaaggaaggtgagcacaagaaggaagaggaacacaagaaacacgttgacgagcacaagagtggtgagcacaaagaaggtattgttgacaagatcaaagacaagatccacggtggtgaaggtaaaagccacgacggagaaggcaaaagccacgacggtgagaagaaaaannnnaagnacaagaaggagaagaaacatcatgatgatggtcaccacagcagcagcnnngacagcgacagcgattaaggtgaggaagtgaggaggatcgcttgaataaaacagatctggttctggctattattaattaatgttgctgtatgttcttatcatcttagagagaggttaaagacaggagaaccgtgcatctatctttgtttgttatgtttctgttttcttgtcatgaaaattatgctcatgtatcttatctaaatcaaaaataataatttgatgaatcataacttgtaagacttgttatttaattttaacttgggatctatgtttctttagaaaaa

SEQ ID NO: 141 - DNA, 1066 bp, Arabidopsis thaliana
ctttttttttttttttttttttttttttttttttttttttttttttttttttttttttttttttttttttttttgaaaccaggaatgctttattgatcttgacaatgtacaatggaataacagaggaatttaagaattgcatcaaacaagcagagaaatatgaggtaatatgtgttcatcagactctggacttcttgcattctggagggaatccacgagggaaccttttgagatcagagcaataattatagatcatgaagtatttctgaacccatctgagtctcctcctgccataagcattgagctcggttgccacttgcaatttaccatcaccaaaagaactcttgaatttagggtcacatcctgaagaggctgtgcaagccgcagcgttgaatcctctgtagtaagctgtgaaaggagccttggaccagtcagtcttgactagaccacctctcgtggcccaatcgtctgcattccacaggctagagtagatcctcatgggttgactctttgggaaaggaacgccgagcttctctgcattgttgaacactctaatgggtaaattgtccaccaagaatatgatgtgttggggtctccagacaatggagtaagtgtggaagttcttggttgggtcgaaccagagataaaactgttgctctctgtctcctttcccttgagcaaagacattggtgtgaagaacataaggcttccctgtctcgttacctagaaactcaaagtctatctcgtcatgtgttgctccttgtgaagacaagtagtaagcagtgacggtgccggccgagtttccggcgacaagtttgagctgcatatcgatccgaccgaacaaatactcttttttggatttgaaacctgacccggaaacctggtccagcgacaaagacagcatatttcctccgttgaagattttgcctctgtggtcaccccaagtgaggtcaaactcgtcgaagaagttgcttgcgtaggccgaaccgaacaatgtcacaagaagaacagtcgccacgatggtggtgaggctcgaacttggacccatttgggttggttggcggcc

SEQ ID NO: 142 - DNA, 1065 bp, Arabidopsis thaliana
cttttttttttttttttttttttttttgaagaaaaacactatagaagctcattaacaatcataacagctaggcctatgaacattcatgataggcctgccctagttacaacccgaaaaggctcggcccattaacaaattaaagcatttcttttttaatttacaagagagacaacattgctttcttattgtgagaaccccttatcccccatacaaacaaaacaatcaaatacaaatgttactctttcttcaattaatcgcctgtagagatgttgttgcttcatattcaattgacttggtgaactgagatatcttaagatcaagctcattccactctgaagatgggtcacttccagctactatccctgtccccgcatagatcaatgccccaagacccttttcgactagagctgatctgatcccgactgcaaattcactctcctcgccaccaaaaaatccaataggtcccgcatacattcctctatcgaatgattctatctccttaatcaaaagccttgcttcttctgctggaagcccacaaacagctggagttggatgcagagcagccaatattttatactcatcatcttccttcgtaagtctccctgccaattgagaatatagatgttgcactcttgcaagcttcctcacagtttttttgaggcttgacaacaactctgtcacatataccgtttaacttttctcttatattctctcgtacaatagagaactcgaggtcgtctttcggactggttagtaagtcacgctctatctccatatcacgagcactagaagcagctctaggcctagttgcagccaaagcttcactgcagacacctaattgagtcctttggaatagtctctcaggcgtgtttccgataaaagctggtgcaccaggtggttgaagacagaactgatatgcatcatgcccttcacgctgtaactgtgctagccaagcaatgggatcaatgtcggtatccgtaattatcctgctgttacgagcaagaacaaccttgttaaggggtgaacttttctggttaatcatctctaaagccttctctacagcag

SEQ ID NO: 143 - DNA, 1062 bp, Arabidopsis thaliana
  misc_feature (1)...(1062): n = A,T,C or G
tttttttttttcctttggaacttcttccttgtttacaaatattgcattaagagggcacatagataaacacattgcacacatacatgtagtagatcaacaatagaactatagaagcaactaaggacaaggccagaaaccagaggacttgatgtcttgtttttacttagcttctggacttgaaggggatggctctgatgacaaccacatggtaaagagcagcaagtgcagctccaatgaaggggccaacccaaaacacccagtggtcatcccaggaatggtctttgttgtagatgattgcagctccaaggcttctagctgggttgatgcctgtgccagtgattgggatggttgccaagtgaaccaagaaaaccgcaaacccgattgggagtggtgcaagaatagggacatgagagtcacgagcatttctcttggcgtcanntgctgagnnnactgtgtatacaagaacgaatgtgccaatgatctcagctccaagaccacttcccttggtgtaancatgagccacagtgttagctcctcctcctagagcctggtattgcttaggctggaaccctttaaccactccagcaccacagatagctcccaagcactgcatcactatgtagtacagagctctagtaagcgacagcttccgggctaagaacagaccaaaagtaaccgctgggttgatgtgtccaccggagataccagcggtacagtagactaaggcaaatatcataccaccgaaagcccaagcgattccttggattccgacggaagcacacatgttcggtgaccttttcactcccataacagtcaagacagtgatgtagagaaagagaaaagtagcgatgaactcagcgatcccagctctccaaaaagaccatgaagaaagctcaccaggttcgaaaaacggagctggtggtggttccttgtagtccttgtcactctgagctgatgttccgattggttgtctctccgggaacttgttagctccaactctaacgtcttcttccttgccttccatatcttcgatctctgtagagagaaattgcggacgcgtgg

SEQ ID NO: 144 - DNA, 1062 bp, Arabidopsis thaliana
ttgcttgggcagccgatggtattactcctgaggacatcaatgccctgcacttaatcccaaaagagttgtcgctgaagatagttagcaagattgagaaaggagagaagttcagggtctatgttgtggttccaatgtggccagaaggtctcccagagagtggatcagtgcaagctatattagactggcagaggaggaccatggagatgatgtacaaggatgtgattcaggctctcagggcccagggtcttgaggaagatccaagaaactatctgacattcttctgtcttggaaaccgtgaggtcaagaaagatggagagtatgagcctgctgagaaaccagaccccgacactgattacatgagggcgcaagaagcacgccgtttcatgatttacgtccacaccaaaatgatgatcgttgacgatgaatacattatcattgggtctgctaacatcaaccagaggtcaatggacggtgcaagagactctgagatagcaatgggaggttatcaaccacatcacttgtcccatagacaaccagctcgtggccagatccatgggtttcgtatgtcactctggtacgaacacctgggaatgctcgatgaaaccttcctcgatccatcaagcttggaatgcattgagaaagttaaccgcatttctgacaagtattgggacttttactcaagtgagtcactcgaacatgaccttcctggtcacttgctccgctacccgatcggtgtagccagcgaaggcgacatcactgagcttccaggatttgaattcttcccggacacaaaggcccgtatcctcggcaccaaatcagactacctgcctccaatccttacaacctaatctcactaagcatgtcaagtaatgatctctctctccctctctgctttgctgctgttgtagctttgaataaaacttgagtgtctacctttagaattaagaagtcaaatggttgttatgatgatgcacttctttacccctttggtttttatattcgtacaatgacgtggtgagagaatgtagctttgtgatcttgttttgttgttgttatgtacct

SEQ ID NO: 145 - DNA, 1062 bp, Arabidopsis thaliana
  misc_feature (1)...(1062): n = A,T,C or G
cgccattgaaatggctctcaaagcttcacctgttaccggattattccctcctctccgtcctactgcttcttcttccccttcgacttcttctaatcgcccttgttccctcaggattctccctctcagaacatctttcttcggtaactcaagtggagcgctgagagtgaatgtgttgagattagcttgtgataatagactcaggtgcaatggtcatggtgctactatgaatctttttgaacgattttctagagtggtcaagtcatatgcaaatgcgctcataagctcttttgaagacccggagaaaatcctggagcaaactgtcattgaaatgaatagtgatttgacaaagatgcgtcaagccactgcacaggttttagcatcacaaaagcagttacagaacaaatataaagctgcacagcagtcttctgatgatnggtacaaaagagcacaacttgctcttgcaaaaggagatgaggatcttgcacgtgaggcccttaaacgacgaaagtcttttgctgacaacgctactgctttgaaaactcaactagatcagcaaaaaggtgttgtcgacaatcttgtttcaaatacaaggctcttggagagtaagatacaagaggcaaaagcaaagaaagatacgctccttgcacgtgctcgcactgctaagactgcaaccaaagtgcaagagatgatagggacagtaaatacaagcggtgctctttcagcttttgagaaaatggaggagaaagttatggctatggagtctgaagcagatgcactaactcagattggaaccgatgaactcgaggggaagtttcaaatgcttgaaacttcatctgtggatgatgatcttgcagacttgaagaaagaattgtctggaagctcaaagaaaggagagcttcctccagggagaagcactgttgcagcaagcacgagataccctttcaaagactcagagatcgagaatgagttaaacgaactgcgaaggaaagctaacgacttttagatatcggctgtttccgaattgtgactgggttacattacgttcctgctgtaaactatctt

SEQ ID NO: 146 - DNA, 1062 bp, Arabidopsis thaliana
tcgagcggccgcccgggcaggtactcatcaatcgcatcaaccatgtagagaacttcaatacctttcttcttgagcttctcaaggaatggagagttctcaacagccttcttgctctcaccagtgatgtagaagatatcgttctgaccttccttcatccttgtcacgtagtccttgagactagtcaattcatcaccgctcttggttgagtggtaacggagcaactcagcaatcttggttctgttttgggagtcctcatggataccgagcttcaggttcttagagaaagcctcgtagaacttgttgtagtcttccttgttctcagcaatctcaaagaagagctcaaggcacttcttcacaaggttcttgcggatgaccttgaggatcttgttctgctgcaatgtttctctcgagatgttgagaggaagatcttcagagtcgacaatacccttaacaaacccaaggtactcaggaatgatgtcttcacagttgtccatgatgaagacacgacggacatagagcttgatgttgttgggcttcttcttagtgtcaaagagatcgaaaggagctctcttgggaacaaagaggatagctttgaactcaagctgtccttcaactgagaaatgcttcacagccaaatgctcttcccagtcattgctcaaactcttgtagaaagcagcgtactcctccttgttgatctcctctggcttcctcatccaaatcggtttctgcttgttcaccaaatcccactcatgagaaacctccttaatcttcttctttttcttctcctccttttctttctcctcatcaacttcctcaaccttgccttcctcatccttcttctcttcctcctcttcatcatcagagatctccttctcaatggtcttctcaatccagagagagattgggtagctgatgaactcagagtgcttcttcaccaaatccttaagccttcgctcctcaatgtactccatctggtcttccttgaggtaaaggaccatcttagttcctctaccaagagcctcaccagaggtgtctctggtgacggtgaaagcggacgcgtgg

SEQ ID NO: 147 - DNA, 1059 bp, Arabidopsis thaliana
  misc_feature (1)...(1059): n = A,T,C or G
ttttttttttttttgactttggctaagactaggtcaatgtagttccacctccaagtctcagtaggtacattctccaacattttattcaatacattataacatttcttgttatttttagctcacaataagacttattacagcctagaagctaacagtaataagtggtagaaacgacttcaaactcaactcccacataaagcttatcctttaccaaataaggttcatttagtttccccagaggcatgaaatccgcaaagccactttggtccgaannttctgcatcaaaccagctcaaacctgattcctcaacatgattccagctaacttgatccaatacccgcagcttgaacttggcgtaagtttttgtcattggtgcattgttgacaaacccttctgctgatagatacacagaaaatgatttgtctttttcatccatataccctcttggatgaacttcaagtctccatttcctggttccaacgacaaattcattagactgatgagnntttccagggntgaaggacgagaacttgctcatcatccaagtgactttgtggttaagaggcttctctattaagctaaaacactctgctgttccgggattagcaggttcaatcccatgaaacttgacaccaaacatacaacaatctccaataaggaanncttttctctcaagatcagcaagagatatgaaccttaaaaacccctcactagctggttctggatttatatcaaactcatctcgtccatgggtgtgccattttcgcnnnagttgactgacgactaggagctcatatgtaggcatatcatttaccggaacttgattcactaagaacatggagacatgagtccccttagcattcttatgcccatttgggtacacagagagtttccatttgtgaccagcgagatcgaaaacagaggattcgaccttttcgattccatgctttttgagtaaagagaagttgtctatcttgaacaagtgagatgttgtgnnacgtattttgaacagcctcaccatttcttcaatggggattggtcgcgacattgtaagaagct

SEQ ID NO: 148 - DNA, 1059 bp, Arabidopsis thaliana
gccactcatagtaatcatatttatttatatgtagaatttatgtgctttaactgattttcatgtgaattacaatgggaaataaaaatccgagtctaacattttcgatgtgtcccacttatgcaaactattgccggagacatcataaaaaacgacactcaattctgatctagtgatcttaactgacatgaaaccttgtccatcgtagaaaaatttcatatcctctggtgttgtccaattgtaatagcctctccatgcctttgacccaccaccactcgttagaaactgaattgggctttgtgatgtgcttatatgttgcaagcaatgatcatgaccgttcatatagagatcaactttattcgcctcaaggatgggtaagaggagagattcaagctctttggtattcccatgaatggaagcactctttatagcatggtgacccaccacaattttccattttgcacttgattctcttagacccatctccaactccgttaagatggtctgaaggtaggattttcgcggtgatacgccgctccagtcgtaagtttggtcttgtggactgaggaaataagcatctacaaaaggagttgtgtcgacaaagaagagctctgcgatctcagcgtcaacgatgaaggatctcatgcaaatccaacggctatccatagatctgaggataggactcaattgtgcctcaacatctcctctatagtcgtgattccccaatacaaggtaccaaggcttttgcaggctaggagaagtgtagatattactaaaggagagttgaaaggcgggatcatcgatacttttcatcccgttatcgtagatgttatcacccgtcgataccacaaaattgatatccatctcctccccgattctccccatctggagggcaacttgggattggttgtagagtccatgcctaccccaatctccaatcaccagaaaactgatagagccatcggggtttggagcatgttggaccgttgcgagctcagcctcaagttttggagccaaagataataataagaagcaaataagcagagtcattactatgcttaa

SEQ ID NO: 149 - DNA, 1058 bp, Arabidopsis thaliana
tttacgaactgacatgaagagaaaacatgaatttgtaactactaagagaaaccaaaggcaaacgattaacaaagacaatcaaaaactaaagaaggaaatagaagtcactgagccatttcataattaacatcaatccaccatctctctcattacacacaaaagaacaacaaataataattaaagcatataaatcttaaagttgtttcttgacattatcttaaaaaaagccttcattaattggttgcgttgcttcggaacgagcccaaggccttaattgctgaagctctcaatatgtattggtggtaagctgctgcagctagtgctcccaagaacggaccaacccaaaagatccattggtcatcccacgccttctcgttgttgtagataacagcagcaccaaagcttctagctgggttgataccagttccagtaatggggatagtagccaaatgcaccatgaacacagcaaatccaattggaagtggagccaaaacggggatgtgagagtcacgagcgcttctcttagggtcagttgcagagaaaacggtgtaaacaagaacgaaagttccaataatctcagctccgagagcagttcctttgctgtaaccgtcagctacggtgttagctcctccaccaagagtgttgtaaggagttttcatgaaagctttcacgaaacccacaccacaaatggctccaagacactgagctatcatgtaaccaagagctcgcaccaaagagaccttacgggccaagaacagaccgaaagtcacagctgggttaatgtgaccaccagagataccggcggtgcagtagacgaggacgaagatcataccaccgaaagcccaagcgataccaagtaaaccaacgccgtcacaaggaccggtttgcttcttgtggccgatgacagtagcgacggtgacgtagaggaagaggagtgtagcgatgaactcagcgatgagagctctgtagaaagaccaggatttgagctcacccatgtcgagaagaggagctggtggaggatccacgtagtcttttccatggtgggttttgccgcggcc

SEQ ID NO: 150 - DNA, 1056 bp, Arabidopsis thaliana
  misc_feature (1)...(1056): n = A,T,C or G
cgcgtccgttggcttctactatgcgactttgtagtatcagtgggatatcaaggttgttgagtttaagatggttgagtctgcgagggtctaaagttcatggagatgctagcgtattgaagaagctgcagcaattggagaatctacaagatctacgcataactgtatccgcggagttagttagtttggatcaaaggttggcgaagttaatctcttttctgggtattgaggggtttcttcaaaagccattcgatttatcattcctggcgagtatggagaatcttaatgggctatcgctggataatagttatttctcggagattaatataaagtgcagagaaagcgagacggactcgtcttatttacacattaatccgaaaattccatgctttaccaacctctcaggtctgtttataagtaagtgccatagcatgaaggatctgacttggatattgtttgctccaaatcttgtctacctatacattggcgattcaagagaagtgggagaaataataaacaaagagaaagcaaccaatcttacaagtattacaccatttctgaaactagaaaggttgtatttgtatgatttgccgaagctggagagtatctactggagtcctctcccctttccgcttttgttnnccatggatgtttcaaactgtccaaagctgagaaagcttccattaaatgctacaagtgttccaaaagttgaagaatttcaaatacgtacgtatcctccagaacagggaaatgagcttgaatgggaggacgaagataccaaaaatcgattcttgccttcaatcaaaccgtactagtacgtcgtcgactaaagatccattactcaggaatgggattcctcactgtccaaaatcagaatcaacgcttcttcttcttctattgttttatctatcttcttgtagtgcatttggattgtataattgatttgcattctgacacttctggaatgtgttgtgttgttcacttggattatgtttttcattttccttttgtattccctaaaacgttttgcatccttttcagactacatttttacacaaa

SEQ ID NO: 151 - DNA, 1056 bp, Arabidopsis thaliana
ctttttttttttttttttttttttttttagcaacgaaaaacagatctaaaccatttataagttaacttgtttcatgaggagaatatttatgacaagaagtaaagattgtctaaagagtacaatgctggaacaaaaaaagtgtcgtttaaaaccctaaatttcctcaagactgaactttaaacttggaaactctttcaaaacgccgaagctgagtctataacaactggaaggagcaaaacagctctactttagttcttcttgttctttgttttcccagacgatgtcttggccaaagtagttccctcgagccattcatcgagtgatgcctcggtagacctagttcctacttccaccttggaaacctttttggttttcttggtgagacgctgaacttggctgtatgcccatagaccgaggaggaggaggagaccgattccgagtgttaaaaggaaaacagattcgccgctgagaagacctccagattcaactacctctatggttccattgtagaagacactctggtatggctttccttccacatcgtatatgatataacccaccagatcaaatgctccaggctgcaagtactggctgactgcaaagatgtatgggaatgttgcttgaagagacgttgggatggatgcattgttaagtctcaacatggttagattctgaaccaacaacttatgatcataaggaagatgaacgctggccctaattcccatcacacctactctagttttcccttcatttttaagaccaacaaggagctcagtctcttctccagctggaaccaatttggcactgtttttggggaaaacacaaacagtctcaactcctggaaatgaggacaagttcatatccaaatcatggtcatcttcctcaaccgcatcatcagtgttttctcccacaacatcgtcaacaagacttgaatgatcctcggcatccgattgacatctagcaacttgaagcagaggagatgcaaggagaaggagagcgaggaacaaaaccctaagattcatcatcgcttgattctatcaaatatcggacgcgtgg

SEQ ID NO: 152 - DNA, 1055 bp, Arabidopsis thaliana
taaacgaaaaacataactgtgttcagatctcgaatatacatttccaaaacgtgacaagtttatgtttttttccgtatgtttgcttaataacactcacattattgttctaacagatataaatggttgagaattgtacagagaagaatctacagaccatgaatcatgtattgtcggctgttctttgagcttctgctgttcactgtttgcaattttatcctcctcttctgagaagggtttgaatgaggatagagaaactgattgaaactcttgagctaagcagtactatacctaggagcccatccactatccgaaattcttgctcaagcccatgaaccctcttacttagcttaccgtatttatctttcagatcctgccattacatcaaacaaaccgcagcaactcaaccacgacgttcgaaaaactggtggaccagaaggcaaaagactcttttctttagaacattctggcacttcatattctttcacattcttgatttctttgttagtttcctcagcagatcttggactaaggatctcttccttttcatcagacttctgttggagagaatccgagtccgtcgaactctcaacttgcttacttttgtcagacatcacaacttttgagacagaagaacccataggcttgacagaatcaagagcaggtgaaatttccaaacttgaagtactatcagcctctctagaagtttgagtaaaattttcaggacaggaattgagttgtttgtttacaccattctcctcgtgatccgttcttcctcttccaacttcaataacgtcttcacctttcgctacttgtcccccagtaaagtctgcatcttctgctttctctttaacaatgtctttccctaaactagataatggaggaggtgatggatctctagtcccaaattcttcatttccttgagatccaggggaactcaaattgccatcactgtctctctcatcttggcttccatgttcatcatgtccatgaccattgaagcctttgttgttggtagcgactccagtggcttcctgctcctgctgcttcttcttcaa

SEQ ID NO: 153 - DNA, 1055 bp, Arabidopsis thaliana
tttttttttttttttttttttttttttttttttttttttttttttccgccaaaattaacaaatttatttgaagttgaaaatcgacattgcttgattttgtttatatcaatcgtttaaccacatagcatcatatacttaattctccaaacagaaatcagatatacacacataaaggcttttggattctcttatagttataaactggatcacatcactgaagcatcgttttatgcctttcagttgtcgccttgcctcagtatacgcaatatggtcaagaagagattgaggatgtccaagtagagagctactgatgctaggatgtattcgtcatatgtgaaacgcttgatgaggttgtcggtatcatagactatgtatccgcagaataccaaggcactgaatcctccgtatacggcaacagaagtcgggccaagagggaagaacatctggatgaagctggtcactacaagaatgatgaggctggtgaagagaatgggtccaaggaagctgaagtcttttcccttctttgcagcccagaaagtgtatgcggttagagatccgaccacagacagagtcaatatcaaggcttgtagcacaattcgtccttctgtcatagcacaactgacaccaacagtgaaactcaatgaaacagtgaagagggcaaggaggatcaggttaacaggatgcttctggtggtaaatgtgcagaggccagattaagatgaagggaacgatgcagaggaagagaagaatcccaggagatccggtcaagagatcgttaacaggaggattaagaacaacgacggcggagataagcgtcgtaagaagaagctgagctgagagaatcccatagaccttacgaataaatccccatcggagctgattctcgccgtaacttagcccaggataaagcgtcgcttctccgactcccatctcaagatcaatatcctttccggcggaacgatctatgccgctcatgctcacgctcgcgtatccgtacggtttgtccatggctaatagctagattcgtcttcgaaagcagatctggactagttctag

SEQ ID NO: 154 - DNA, 1054 bp, Arabidopsis thaliana
  misc_feature (1)...(1054): n = A,T,C or G
aaatgtattatcgagtaatacaacttcttattttctcaggaagaatacgtatacatgtaatatcgtatctcagaaacaccaaaagaaagaacaaaataaatcaaagtaacatcacaagatgaaacaaaacggaaagaaaaatgcttgaaaattcccataatagaatcaaagtttacactccttggggaggccttgagggaatctcttaaaatcggtacaatagttgtagatcatgaagtctcgttgcacccacatcatttttccgtactgggcaggattgagagtcgtccacatccacgagttgctgtttggctcgcaagtcacccattttgagcttgatgtcctgctgcatgagctttggtcgttgaagtttctgtaagaggccttgaatggtgcgttgctccagtcgatcttcacgcgaccgccttctgtagcccagtcatcggcttnncaaannnttgagtatatcntcatcggctggttcttagggtaagccaccccatttttctcgttgttcttgaacacccgaattgggatcccatccacaaggaagatgatgttaacagggttccagtggacggtgtaggtgtggaaatccgcagtgggatcgaaccagagacggaactgcatctcacggtcgcctttacctccggtgaacacattggtgtggatagtgtaaggatgtcctgtgcgatttcccaaaaactcgaagtcaatctcatcccatgccgtgccttttgacgataggtagtaggcggtgacggtgccagcagagtttccagcgacaagcttgagcttcatgtcgatcttaccaaacaagtactccttcttggattgaaaacctgagccggagaccttgtcaagagtacaagtgagaagctgtccattctcgaatatgttggcacgaccattaccccaagtgatatcaaagctctcatagaagtttccggcagatgcagccaccacaaagaagccaatggcaaggaggagagacaacaacagaggctgtttggttgcgaaacacgccatttttccccgattctctgttgtttct

SEQ ID NO: 155 - DNA, 1054 bp, Arabidopsis thaliana
ctttttttttttttttttttttttttttcttaaagactttcaacgtaaataacaatactaccatgtaaacatacgatgtcttaccacaataaatttacagggaagtaagttttcttaagactcaccactgactttggcgacaataactgaagcatagtgagcaatgttagcctcaggggattgtttaagccttgcaatgaccgggaacaactctgatgacttcacaaactgtctgcaaatctggtggttcgaacacattttagccaatgagaagagtgcaatcttgagcggtgactcactcgctgtctctttcttgcttgggttcaaggcaagagtcgagcaatccgcaactagcctcagtaacgtttgtaaagctcccttggagactatatcttcacagagtttgttggagtttcggacaaggttgctcaatgcaccagccgcgtttgcttttgtcttgtcttcttcagccgtggtcaaaacgtttgctagctgcgttatagatcttcttagctcttcatacagcgtgtcgttatggtaagccgcatttccaatagcaaaacaagcgaatttctgtgttcgtttgtccggatcagcgcatcgatcaatgaggagaccgatgatttgatgttccgcaagagcgctgtagaaatatccattgtgtctgcacatattgccaagagcactacaagcttttgcacgtatatttggatccacatgggtaagatattctttcaaaggctgtaaaacagaagcctcgccgatgtatttataaaaagccttatccatcctcgatagatcagatatgatcatcaaaatatcaagtatgacttctcttggacttgattggttgagtaattttttcattctattaggatctaacagacctttgctcacgagatctacagcaagacgtggacgacccaccattttggcaagaaaagcaacgggccttactaaatcttttaattccaaatgatccaagcaacgtaggattaaactcggcactcccacctccaggaggactattatgtatttgtccacggacgcgtgg

SEQ ID NO: 156 - DNA, 1054 bp, Arabidopsis thaliana
ccacgcgtccggcttcagtggcctcatagaattgttgttcccattggtggtattcctgttgatttaagtgatttggagcttaagccacagggaaagcttatagtaacagttgtgaaagcaactaacttgaagaataaggaattgattggaaaatctgacccttatgctaccatctacattcgtcctgtattcaagtataaaacaaaggcaatcgagaacaatctgaatcctgtctgggatcaaacattcgaattgattgcagaggacaaagaaacccagtcgctcactgtagaggtatttgataaagacgtaggtcaagatgagcgccttggacttgtgaaacttcccttaagcagtttggaagccggagttacaaaagaactggagctaaatctgttgtcttcacttgatactttgaaagtaaaagataagaaagatagaggaagcataactcttaaggtacattatcatgagttcaacaaagaggagcaaatggctgcgttggaagacgagaagaagatcatggaagaaaggaagagactgaaggaagcaggagtgataggtagcacaatggatgcagtcgggatggtgggaagtgggctcggtgctggtgtaggaatggttgggaccggtattggcacaggagtcggattggttggaagcggtgtgagctcgggtgttgggatggttggtagcggttttggagcggtcggtagtggattgagcaaagcagggagatttatgggaagaacaatcacaggtcagtctagcaaacgtagtggctcctcaacacctgtgaataccgttccagaaaacgatggtgcaaaacagcagtgagtaaactttgggtttaagcaagatttgtgatcatgacttcgtttttactctttattgttctgtttttttcccctttaactctctcgaacttgatttctggattcactgcagtaatttgttttcgttgtgagccttcaaattaaaatcttgtacaaaagtcatttgcttaatcgtcccataaacaatagattccctctcaaaaaaaaaaaaaaaaaaa

SEQ ID NO: 157 - DNA, 1053 bp, Arabidopsis thaliana
ccacgcgtccgcatggcgcttcttcacaagcaaaacatttcctttgtgatactcctcctcctcggtctccttgccgtctcttatgcttgtgattgtagtgaccctcctaaaccatcaccacaccctgttaaaccgccaaaacatcccgctaaaccacctaagccccctaccgttaaaccacctactcacaccccaaagcctcccactgtgaagcctccacctccatacattccatgccctcctccgccctatactccaaaacctccaaccgtgaagccaccaccacctccctacgtgaagccaccaccacctcccactgtgaagccaccaccacctccttacgtgaagccaccaccaccccctaccgtgaagccaccaccaccacccacgccgtatactccaccaccacccacgccgtatactcctccaccacccacggtgaagccaccaccaccaccggtcgttaccccaccaccgccaacaccaaccccagaggcgccatgtccgccaccaccaccaacaccatatcctcctccgcctaaaccggaaacttgtccaatcgacgcactgaaactaggcgcatgtgtggacgtgctaggcggtttgattcacatcggactagggaaaagctacgctaaggcaaagtgttgcccacttcttgacgacttagtgggtcttgacgcggcggtttgtctctgcaccaccattagagcgaagcttctcaacattgacctcattatcccaattgctctagaggttcttgtcgactgtggtaagactcctccacctcgtggcttcaagtgtcctactccgctaaaaaggactcctctcttgggttgatctcttttgtatttcatttgatacaacaaaaaagggtttgagacgttaagatctactagattcttatttatgttttgcgaaacaataattaaaagggtctaaatttagtaattgttctaaaaatataaagcaaattttatgtattgtatgatgattatgtacgttgaaataatgttatctgaaatttgattaaaaaaaaaaaaaaagggcggc

SEQ ID NO: 158 - DNA, 1051 bp, Arabidopsis thaliana
tttttgtttttttttgttggattcgaaactcaatgaaaacaaaagcttcagtgagaaatcaaagtaaaatgcaacatatccaatggaaaaaactgtttatctatgataatttcaagatagggtcggtaataatatgatgttcttctggtagatcataaggcaaattgattccatggactttgaggtacttcaggcgaaagattgaagtgctctctcgaagttatcttcagctgatgctgctcgcttcacaaggacgtgttctggatgtgaaagtttcagctggtttaggtagcgagaagatgatttcccgacgtgaagactgcatacaacgaggtttgcaagagtttctgggtctttagcatccttgttgagtgcttcaagtagtagagtctcagcttcttcaaaattacccatatgcatgcagcaaactgctttgccgttcaagatcaagcttgtcattgggtacttctcagagaaatcctggaagattagataagcttcctgtatcttggaaccacctactgccagattcaaccacgcgctcgcgagctgagtgagtgtgtggtcttcatcaatctgttgcatcactctcagttgtttctccgcaaaatctgatctgtgcatctttatgaatatctggacattcaaagcatgcagatccatggttcctccagaatgagtgtgcttcagagcctcattatagtcttcctcatgcatgaatatagtaccagcaatcaacctgataatagcattgtttcctacagttggatctgccaaccattccctcaagctcgaaatggttgattccttgttttcaggactcgatagatacatagcaaggagtttcactgcctgtagaggagtagcagcggcttcatcgatctcactgatgacaagctggtaacttccgagagcgatgtaagcgcgatggacgagacagtctcgctcgacgatatcttcctgcgaaagattagggatctcgctgttgttgatcgcagcttgataagcacccaagtagaaatggtttctcaaattgaagagatgatctggt

SEQ ID NO: 159 - DNA, 1051 bp, Arabidopsis thaliana
aaaaacaatcatcatctcgacctccacttcgacccgcttcaatatttgatgaagaagaagatcacgacgtcgagaaggagatttctcgtcaagcaacaaagaccaaagctcataaagaaattgaggagcagcataagaaagccttagaggaggatccttctgctttttcatatgatgaagtttatgatgatatgaaacagaaagctgttcttcctcgaatgcaagatcgtgaagaacgcaagccaaggtatatacagaatttgatgaaacaggcagaacgtagagagaaagaacatgagatagtttatgagagaaagcttgcgaaagagagggagaaagacgaacatcttttttcggataaagaaaagtttgttactggcgcttataaaaggaaacttgaggaacaaaagaaatggctggcagaagaaagattgcgtgaacttcgtgaggaaagagatgatgttactaagaagaaagatttgagtgatttctacttcaacattggaaaaaatgtcgcttttggagctcgagaagtcgaagctaaagaggcagagaagctcgaggaacaaagaaaggcagagaagctcgaggaacaaagaaaggcagagaagctcgaggagctgagaaaagaagtaacaagggtagagaagaaacgaaaatcaccggagaaggaagtatctcctgactcgggagaatttggatcaagtcgtagcaaaagtttggagccactagaagcagagcaagcagtttctgaaaaggagatgggttcagatggcactgaagagagaaagtcatcaatcaaagaggcagcaaaagaagtgccgaaagccattaacgaccagaagagaagagaggatgcgatcgctgccgctaaagagaggttcctggcccgtaagaaggcaaaaattgaagagtatgtgcaacttggctgatttcagtccaatagttaaatcttggtgaacttgtcttcttctgattatcgaccaccctcttttttataagtaacttttcaagataacgcttcttataaaaaaaaaaaaaaaaaaaaaag

SEQ ID NO: 160 - DNA, 1050 bp, Arabidopsis thaliana
  misc_feature (1)...(1050): n = A,T,C or G
ctagagcggccgcccttttttttttttttgttaaaacatcataatattttnaatagttttttccgcggacaatgcggaatgagttcttattagacaagaaaataacatatcacacgtcacacacaatcgcagaatacaaagtttaaaaaatcttcattatcattggattgaatcacagacccacaagtgctaacaccgaagttgtcattgctgtgatgaaaattctcctcaatatttcgtttcctttcataacgttaatagacgatgagccgcttggtgattgagaagttggcaaaccggttgtgtcatacttcaaaaaacatttagaaagatagaactgagcaaaacgagcattggtacaacagcctgagagacctttgaccacaagtctcaaacagacgccgcnatttgctggatcaagatcaggactacactgaaccaccgtgtctaatgtatacgagccctctaattcatttacacgtgatatatccttcacgtaataaggcgtagaagcagacaaagaagactttgatgctatgaggataattagttgctctaccttattggataacgtttgttggaaagaactaaaaagagaagtaggaaaagtggcgagagagtatttagcgacgtaaggcccgtctagttctacgagcgtgaagaaggaaacattggagtatcgaaccatacactcctcgtagaatattagagcagtttttctggaagtgcagttattatttttagtgatttctagggttgcggttttgacacagtccgaacatgatgttttggtgaggtctcctcggcagagaaacatgccatagactgtgtcggggctaagaccgattgtggcattggaataggttccaagggaggaacggtcacggagagaagaaagtagggtttcacggtttgctttgtatgagctggtttgtgtgaagttgtcggataatctgtcgtcgcagaaagtggccatgtgttgaggttgggacatggtttggtgagaaaagagagagaataagaagaagaagcaaaacaaaggagcagtga

SEQ ID NO: 161 - DNA, 1050 bp, Arabidopsis thaliana
  misc_feature (1)...(1050): n = A,T,C or G
ccacgcgtccgaatcactttcgaaattacatttacgctttcttgcaatcaaattttccgatcttaagttcagaagacgatgtcagaggtggaaatagagaacgctgctacgatcgaaggaaacaccgctgcggatgcgccggtgacggatgcggccgttgagaagaagcctgcagcgaaaggacgaaagacgaagaatgttaaggaagtgaaggagaagaagactgttgctgccgctccgaagaagagaactgtttcatctcatcctacttacgaagagatgattaaggatgcgcttgttacgttgaaagagagaactggatctagccaatacgcgattcagaagttcatcgaggagaagcgtaaggagcttcctccaacattcagaaagctgttgcttctcaatctgaagagacncnttgcttctgggaagcnnnnnannntcaaagcctcgtttaaactcccatcggcgtcggcnaaagcatcatcccctaaggcggcagcggagaaatctgctcctgcgaagaagaaaccggcgactgtggcggttaccaaggcgaagagaaaggtcgctgcggcttccaaggctaagaaaacaatcgccgttaaacctaagactgctgctgctaagaaagtgaccgcgaaggctaaggctaagcccgttcctcgtgccactgctgctgcaactaagaggaaagctgttgatgcgaagcccaaggctaaggctagaccagccaaggcagccaaaacggccaaggttacatctccggctaagaaagctgttgctgccacgaagaaagttgctacggtggccacaaagaagaagactccggttaagaaggttgtgaagccaaagacggttaagtctccagcaaagagggcttcttctagggttaagaagtgaagttagggtttgtaggtagaagaatggttaacgatagtttagacttgtataattcaatcatctttatgcgactttgtttgcttttcttctttcagtgttcttgttattcacagttcctttggactaccccttaaatcatatatagat

SEQ ID NO: 162 - DNA, 1050 bp, Arabidopsis thaliana
tcattggatctgacgattatatctgcggaggatctcaaagacgttcaattgatcggtaaacaagacttgtacgccgtcgtttccatcaacggcgacgctaggacgaagcagaagacaaaggttgataaagattgcggcaccaaacctaaatggaagcatcaaatgaagctcaccgtcgatgacgcagcggcgcgtgacaatcgtcttactcttgttttcgagatcgtggcggatcgtcccatcgctggtgataaacctgtcggtgaggttagcgttccggtgaaggagcttttggatcagaataaaggtgacgaggagaaaacggttacttacgccgtgaggttgcctaacgggaaggcgaaaggatctctcaaattctcgttcaaatttggggaaaagtatacttatggatcttcgagtggtcctcacgcgccggtcccttcggctatggatcataagactatggatcagcccgtcaccgcttacccgcccggacacggtgcaccgtctgcataccctgctcctcccgcgggtccttcttccggatatccaccacaaggacatgacgataagcacggtggtgtttatggatacccgcagcaggctggatatccagctggaaccggtggttatccgccacctggtgcatacccacaacagggaggttaccctgtatatccgcctcagcaacagggtggatacccgggttatccgccacagggtccatatggttacccgcaacaaggttatccaccacagggtccatacggttacccgcaacagcaagctcatggtaaaccgcagaaaccgaagaagcatggtaaggctggagctgggatgggactaggacttgggcttggagctggtttattgggtgggttgttggttggtgaagcggtttctgacatcgctgatatgggtgacatgggtgacatgggtggtttcgatttctgattgctgtgttatcaagttttaatttcttaggataattgctctaatgtttttcgtttgatgaatcatgtgaagaacgtgagagatcaaaaaaaaaaa

SEQ ID NO: 163 - DNA, 1049 bp, Arabidopsis thaliana
gcatttagatgggtttatgaaggaactagtacaacaaaagtcacaaaatacaaacatttatatcaacaatggagtaatgaaatttggtaacaaacaaacaacacacaacaaatatgcttacaagtacaaaagagtgagagactattcaccagaagcctggaaaacaatctcaacactgccaccacatgaaaatggaatgaattcaaagaatgatataaatggttaattctaatgtgggcaaaccgaaaaggaaagttttatggggttttcaatcttcttctttcactgagaccgtctcaaatgtggggctgtggtatatccttcgaagaaatccaacactgcggtttcaagattttcaacagagtatttcaagtagttttcgggatgtcttccgctctctatatgtcccctgaatcttccaagaaaggatctataagccgggataagatgctccgatagagatatcctgagttcttctctaagctgagtatccggaaccgaccatgtcgattgaatcctgtgaacctcttcaaacattgtattgaaagctttaaacctctctcttaaagcactcttcgatacaccggaagagaagcttccgctcacatgtaatccttcatctctcaagctattcaacaccctgacccatgtagctctctgatacttggtagctgcttgtctaaatatcccggtaagcttccttaaatacttgtctcctatcaactccattagctccggagagcttttgaccttctgaactatgtaatggacattgttcatgacgaagatgtgagataaaggttcgtccctgtaatgcaaagacttctcttctagattgaattgtagcatcaccattgtccatatcatatgcaaagctaacggagatattccttcaagctcagagatatccatatccggatcgtttcgatcattggtacatttcaaaccccgacatggtttcgtcatgatgagatcaatcaacgtttccctatagtcagagatcaagttgaggtaattcatcacataccttgtcaatggatgtatagttc

SEQ ID NO: 164 - DNA, 1049 bp, Arabidopsis thaliana
ttttttttttttttttttttgcttcaagaaacattgatttattgtaaaaagagattacaaagacagtgagagtagaaaggaaggaaacatgagtttttgggattacaagcattattattatatagacaagaaacaacaacacatgtgattatctttttgacggatttaacgaccaagcgatgatagatcgatgagattgattgtacctcacatagactgagcttatatggagattggcctctagatgcttggcctcacgttcagacggcttgcaagtttctgtcccaaggatcgatcagcctgagaccagtaagagatccagacgccgcggatctcgtgggtgagacgtggctccgatagaatctccacccatctcttaacaaacctgtcttgcctgtctggtgcccatgatctgtacctgtctccagcctgtttgaagttgttctctttcttgatgacgcactttgttcgaattccagtgtaggagtttgtaggggtgggaactttctcagcgcagcggacaggatcaaactttgaggggtagtaattgatctcctcatctctgtgcatgaagttcataaaaccttcatggtgattgttgtggtgagcacatttgggagcattgactggaagctgcaaataattcggtccaaggcgatgtctctgagtgtcaccataagcaaagatcctacactggagcagcttgtcgtctgagtagtagattccaggaaccacaagacccgggttgaacgcaagctgctcagtttcattgaagaaattgtcaatggtcctgttcagaaccaagcgaccaaccggttgcagaggcaaaatatcctcaggccagatcttggtcacatcaagtgggtcaaagtcaaacttatcctcatctgcaggatccatggtctggatgaaaagtttccactcggggtagttgccagatgcaatggcatcgtggagatccttagtggcgtggctgtgattggctcctccaacaaccttggcctcttcatcagtcagattcttgatcccacaagttggtttccagtgga

SEQ ID NO: 165 - DNA, 1048 bp, Arabidopsis thaliana
tccaggtgtaactccagagaaattacaagaaggtcttaacccaagacattgtgcgttatcacttgttggtgagccgattatgtatccggagatcaatgcccttgtagatgagctacatggaaggcgtatttctacgtttttggttacaaatgcacaattccccgaaaagattttgatgatgaagcctatcacccagttgtacgtaagtgtagatgctgccaccaaagagagcttgaaggccattgatagacctctctttgctgacttttgggaacggttcattgactccttgaaagctctccaagagaagcagcagcgaaccgtctaccgtttaacacttgtcaaaggatggaacacagaggagctagatgcttatttcaacctattcagcattgggaaacctgattttatcgagatcaaaggcgtcacatactgcggatcctctgcaacgtcaaagttgacaatggagaatgtaccgtggcacacagatgttaaagcattctcagaagctctgtctctgaagagcaatggggagtacgaggttgcttgcgagcacgcccactcttgctgtgttcttctagggagaacggaaaagttcaaagtggatggaaagtggttcacttggattgactatgaaaagttccacgatctggttgcttctggagaaccgttcacgagcacagactatatggctcaaacaccatcgtgggcggtttatggagcgcaggaaggtgggtttgatccagggcagttgcgttacaagaaggaaaggaatcatcctcctaaaccacaggcggttttagcttaagaaaggagtaggctaaagcttttttgtttttcattgtcgtcttcatatcctaaaccacaggcgattttagcttaagacaggaccaagctaaagctattttgttagcctttaaagcttcttcttcttggtctaaagcttttttgttttttgttgtcatctaacagtgttaacttgtggaaagatgttaaagtttcgaaatcatatcaaaactttagacagtttcaatccaaaaaaaaaaaa

SEQ ID NO: 166 - DNA, 1045 bp, Arabidopsis thaliana
  misc_feature (1)...(1045): n = A,T,C or G
aaccatgataaagatacatatcaatatttcaatatcacaaattatttgtaaacttaagatacatccaccaaatgcagaccaacaatataatatatagtaatctttctcgaaaatcgaaaccatccaatttaagaaaagccttatttatgcaagaaaaccccaaccaaaaccaaaaatgaattagtaaaaatataaagaagatttgaaatatattgtatcaaatgtaatattatatccacgcttctgtagttcattagttgaatctcctgcagttccttctgatctcaccgttacgaccagtaagcacatcaactgctcccatcttcaccattgctctaacgaactgacgcttgaagaaggcgttgttattagcataccgagccacaatcccacgagtctgtgggtcggatgcgaggcgttggtcaacttgcaacactcctctccttttacggatttgcttgaagaactggttgtcgaatctcaatggactcgactggtctagtgccgccgtcgcgctatttctgcatgtgttccttaggctggtaaccaaagcggggtccatggacgggtccggtcgtccagttcnnnnnnnnctagtgattctgtcactaaagagaccacaatttccttgaccannagtgtgtgcacccaaaagagctactgcatcgaacgtgttcatccctttgttcgtgaataaactcacggctccagagacggagatcgttggacccggtaaggttacatcaagattgtttgagaccctaccgtcacgccttcccgtggggatgctgtagcttgggcctccggctaaggccaccgagtcacgtgtggccaatgtgacgatgtcagcacatgagactgtggaagggcatgcagcttctagctgagccttgatccggtctatcaggtcaaattccctgacgcttccgtttggtccagcagttttctcggaattggttgaatcaatgaggagagaagcgtcacagcccttaacgaaacagtcgtggaaatgcatacggagcaaagcggcggtaacggttggggt

SEQ ID NO: 167 - DNA, 1044 bp, Arabidopsis thaliana
  misc_feature (1)...(1044): n = A,T,C or G
agaagtaaaattttctattgcagagagaaagagagttagagaaagagagagagagatgaaacttgtgcaagaagaataccgtnnnggaccgtggacagaacaggaggacatcctcttggtcaactttgtccacttgttcggagatcgaagatgggattttgtagcgaaagtttcaggtttgaaggtggagggagaaacataagaataggtttaaacagaacaggaaagagttgcaggttaaggtgggttaattacctgcatcctggtctcaaacgtggtaagatgactccacaagaagagcgtttagtccttgagcttcacgccaaatggggaaacaggtggtcaaaaattgcccggaaattaccggggagaacagataatgagataaagaactactggaggactcatatgaggaagaaggctcaagagaagaagcgacctatgtctcctacttcctcatcttcaaactgttgctcatcatctatgaccactactactagtcaagacactggaggctccaacgggaaaatgaatcaagaatgcgaagacgggtactactccatggatgacatatggagagagattgatcagtctggagcaaacgttattaaaccggtaaaagacaactactactcagagcaaagctgttacttgaatttccctcctctggcttctccaacatgggaaagttccttggaatctatatggaacatggatgcagatgaaagtaagatgtcttcttttgctattgatcagtttcctctaagttttgaacatggtagtggtcgcctttagtctaggatttgattcatttggaatgtttatatgtgcagcatatatatgttatcaaacgacgactgtagtagtttcctatgacttacatcaaaaatcaccacccactgtactaatctcataagtagtcatcatcttatgcctttgtttagtttgtagagtgagtgaaaagatgtgtaatacaagtcagaactctatttccaaaataaatagacttttgaagtttctgtgaaaaaaaaaaaaaaaaaaaaa

SEQ ID NO: 168 - DNA, 1043 bp, Arabidopsis thaliana
  misc_feature (1)...(1043): n = A,T,C or G
cttttttttttttttttgaagaaaacaaaaaccaatttattcacacgcaatcaactatatatttatacaaaaattagcaaaagcaatagttttatagacatttttaaaactttggaaataaagaaaagtagaaagaaagaaaaaaagaaactgataggtctcatctcaatttgaggctcaagaattaacgaacaaactagaacaagaacaaagaagaagaagtagaaaaaaggcgggaagtggggtcgacactattcaagaaattgcaacttgaccccaaacaatattcaaatcaatcaatttagacccccaaaaaatcagtcggatacaggatttggggagncagatgaatgagaaacctcctcaatgagtctggtgacttcagccatcgaaggacgactatctnnnnncngagccgtacagctcataccgatcttcaataaacgaatgatgttctcattgccctcnggttggtaccttgtgagctcgggatcaagcacatcggacggtgtttgttgctcggtaacagattggacccatctcggcaaatctacgccttcttcattcaactgctgatgcgttggagacttacctgtgagtaattcaaggattaggacgccaaagctatagacatcagctttttgggatattttgcgagcatcagtgatttcaggggcacggtagccatcaatacggttaggtgcagatgtagaactaatgatgggagcaagaccgtaatcagagannnnagcttcataggagtcagataatagtatgttcgaggacttaatgtttccatgagaagttgtcccatcacgcgaatgtaggtagctaatcgctcttgcagctcctaaggctataccggctctggtttcccagttcaacggagttctcccgtttcctttgttcccgtgcaatatcgcagacaagcttcctttagacatgtactcaaagacaagaagcttctcgtcacggctgaaatagtaagcgatcagagtcacgagattggcatgactcattgatcccaaaacatgcaatctctc

SEQ ID NO: 169 - DNA, 1043 bp, Arabidopsis thaliana
  misc_feature (1)...(1043): n = A,T,C or G
tttttttttacagaggatttggaaccaagtttatataattctgaaattgtttacaaatcaaacaaacattcgaaaaacttgcctctttcaaaagctaaaaagtacaaatttttgcacccccacctttttctgatatttacaacttatcaatacatgatgtttttcaaattttctaattccgccgcagagtaaaaataaatatcagcagcaacccctctatttattcagagtagtcctctgttttcagatgcactcattcttcattttttgaggtctttccattttcttcatttggttgttacaaaataactcaaacctacgttggttcacgatgtcgagttgcccaacttgagctcaaggctctaagccgttgaaaatactcaccaagagctaataatcctcgagccgcttgtcgcgttgtcaatatccgatacatttgttgcaatgtttcatgtctcaagtgatcagcctgatttacgaaactgaccaaagcttctaatctatccatagcagaattcacctgaggaatgtaanttnnttcaccgagttgtcccgctgcaacgcagnccgcaagggtgtgttgcagcttctccataccttgagtcaacgcgtcttctgcttgctgacacgattgttttagattgcatacatctagaagttgttgatccgtcaagacatcaaaatgtggcaaaagnnncttgagaagatcggagggtcgaaatccgccaatccataagaagaatcgttctgctgaagttctccacatccctgacatgacgaagaagacatcggctttggcagcagacgatttcatccggaaaagctcaaagtaatgtttcatggcgttttcgactagcgaacgaagctcgatatcgttaatgtgtccgtgtaaaactgttcttagttcacatatctgtctgttctgttcttcaacccaatgtccatattccatttcaaatgcagcaatccctggattcatggtttccgaaaaaccgagagaattagtatctattccgtttcctacatagaatccctgttgtcta

SEQ ID NO: 170 - DNA, 1042 bp, Arabidopsis thaliana
  misc_feature (1)...(1042): n = A,T,C or G
cggccgctgtaattttacattataaacaatattatttatttactattacaaacactttgtttttggccgaaatgagtttgtaagttaagtttttacatgaccatagtagcagcaggaaaaagcctatccaagaaagtatataaacctcctccaagtagaagagcaccacttatgggattgatccatgcagagacctttcgcaacgaaagtaagctctgtaaagctccggcaaaagaagcagcgacgataagtggagcgacgtaacctgttgtataggttaagagtaagcttccaccaattactggatccctggaagtagccacgtaaccaagaagagtggctagaactggagtactacaaggtgaggcagcaagtgcgaatgtgagaccggctagatatgcttgtacactagatgggaagtttgctgctgcagcacgaggatcaaagttgttaaagaaagaaggaagctgaagttcgattatctcaaggagattgagacccattacaatagccagaccggatgcagctactggtaatccttgtcctatttgtccataggcttttccggcaaaagaagctactatcnnaagannnnctaanntagttgctaatcccagtgcgaaagcaactgtatctccaataacctgacctctgcttttgccagacccaaatgcaccaatataaccaagtgtcaacggcaaaacactaagtgtacatggagacagacttgtcacaaggcctgccccaaatattactgccaaacttgttacactgagtgctgatagttgatcttgaacagcttcgttagcctgttggttagctgaatacaagaagttcccgaccgaatctccaaggcttccttcagccaagatgtaaatggaagtggcttgatcnnnnncaatcatcttcaagtctgcggcttttgctgagctaagagttaccaagttcgccactcctaaaccactagcaagcatcgcaagtttaatgcttttgctctctaacctctctaaagaaacagcatcagacactaaacttctctccc

SEQ ID NO: 171 - DNA, 1042 bp, Arabidopsis thaliana
  misc_feature (1)...(1042): n = A,T,C or G
ccggaagaattcaatacccgtttgactgacgcacctaactacgagagcctaaaatctaagcttaacatgcttagggacttttccagagccaaagcagcatcagaagctacttcattgaaaaaggagatcaataagcggttccaggaagctgtagaccgcccagaaattagagaaaaggtcgaggcaatcaaagctgaggttgcgagctcaggagcttcttcttttgacgagttacctgatgcactgaaagaaaaagttctgaagactaaaggggaggtcgaagcagagatggcgggtgtgttaaagtcaatgggtctggagcttgacgctgttaaacagaatcagaaggatacggctgagcagatctatgccgcaaacgaaaaccttcaagaaaaacttgaaaagctgaaccaagaaatcaccagcaagattgaggaggtggtgaggacaccagagatcaagagcatggtggagttgctgaaagtggaaaccgcaaaggcgagcaaaacgcctggtgtcaccgaagcatatcagaaaatcgaggcacttgagcagcagatcaagcagaagattgcagaggctctgaacacgtccggactgcaggaaaagcaagacgagctcgagaaggagcttgcagctgcacgtgaactagctgcagaggaatcagacgggagtgtgaaggaagatgatgacgatgacgaagatagttcagaatccgggaaatcggagatggttaacnnnnnnttcgcctgaagcacaaaacaagacattgtttactcgcaggatcttgaagctctttcgatatccccggtaaagaggctatcctccatgatctgaagcagagagataaactatagtggaggaacagcaacttaaaaaaccttgcttttgtctagttagcttctggaacatgatttctggattggaacaagcgtttgaagttgacttttgtctttggattcatttctgtattgttatgtcttattttgttagaacactagttttgtctttgacatacgtgaacatttttcactcaaaaaaa

SEQ ID NO: 172 - DNA, 1042 bp, Arabidopsis thaliana
cttttttttttttttttttaagaatgaatctctaaatcaattaccaaacgccgccgttccattaccggtcaggcaagacagaccaacggtccgagaattcgcctaacgaaccagtttactcgcatttaaccaaaaattgcataccggttcaatcaaacaacagaacagaccaatctcagaaaatctgcagccatttcaccatcattgctatatgttgctttgaacttcactcttgcgaggggaaaactttgtcagtttcttcttgaagctatatgagtttcttgggatacagcaatacaatcaaactccatgaagtcttacgaacgagtaggctaatgcaccagtgaaaatgtaactatcaactctgtccaatatgccaccgtgtccagggatgagtgagccggagtctttgacacccgcatcacgtttgatcattgactcagttaagtcaccaaagaccgatccgaagaagttaagaactccaaaagctgacaagagattgaggccaggacaacgatttggagagtaaaatggtaatggaaatacaaccaacaagtcctgcaaaagctccttcccatgtcttctttggactaatgctaataagaggagttctaccaaatgccttgccaccaagaaaagcaaacgtgtctgaggcaattataccacagaaagaaatcaatatagcaacaagtccaactgtccaatgtgcttggccgccgaggatagtaggccagcttctcccaattccggtgtttagaactggagcagtaagaccacaacgtagcttaacccagaaacaaggaagatatccacagtaaaacaggccaaacatcgtactactcagctgagaaaaacgcgggtttcctctctgtaacaacaatgccattgcaacaacaaacgccgctgaagttatcgagatatctatatgaccaaaatacaatgtaagtatgggcataagagcacagataatggagcagactctagaaagatatcgtggaggaggtgtcattccttgagcaattcctttacttctcaccagctc

SEQ ID NO: 173 - DNA, 1040 bp, Arabidopsis thaliana
ctttttttttttttttttttttttaacaataaattccaattatgtctcgaagaagacaaccaatttaggaaatataagcagcagaaagtaacggctaaaacaagtctcgaccgaatacttggtggatttctaaattctaaacagaacaaaaagaaaacagaaagacagagagtgagagaaagaaacatcatttggttggttctttaaatgagcctcatcaacaaaaaaggttttttaaccacctacggtaaacgaaaataagaatggtaaaaaagaaagtttagaatcgatcgccatcatcatcttcttcttcttcatcatcgtcatcttcttccctcggattgagtttagaagtacttgaaaaggataccaccgtgagtggcgaagaagggagcaaagacaagagactcaacagccatgagcttgatgaggatgttcaatgaaggtcctgaagtatccttcaatgggtctccaattgtgtctccaatcacagctgccttgtgtggctctgaaccctttggtccaaggctctttgcgtgctctgatacaccagcctcgatgtatttcttggcgttgtcccaggcaccaccagtgttagatgctgatatggcgatctgaacaccggatacaagagatccggcgaggacaccagagagggtctcaactccaaagaagaaaccaacaatgagaggtgtgagcatgacaaggcaaccaggaggtatcatttccttgatggaagcatcggtggagatcttgacacatgtggcgtagtctggttttgcggttccttccataagtccagggatggtgttgaactgcctgcgaacttcttcaaccatcttaagagctgcacttcccacactcttcattgtcatggcagagaaccagtaaggaagcatggcaccaacaaggagcccaatgataactttaggggtcaaaacatctacggtgtggatccctgcacggctcacaaaggcaccaaagagagccaaggagactagggcagcagagccaatggcaaatccctttccaatagcagc

SEQ ID NO: 174 - DNA, 1039 bp, Arabidopsis thaliana
ttttttttttttcatcaaacacatgttaacgtggaaggagaaacagagttgagaacaaacacagacatactgatttccaacgacattactggaaaaatcaagatcaaggatgtaggaagtaaatgtcgttcttgttctaagatgatcagaaaacgattcacaattatatgttcaacgaaataaacggagatatggagtgaaacaaacacaactttcttctaccgacaacatcctctctcaggagacaactctcgcattctccgagtttcaaagcgcaggccattctttacggatgtcaaagctgtagttgatctccaagtagcacttattatcatcatcaagaaacttagttcttgcagaatatgatcctcgagcaaacatgccagaaggagtggtctcttctggcatcacgtggttgtatggctccaactgaggactaaaggttccaagcatttccttagctctgtccactttgacaccggtcttccaaactgtattggtgtacctaagaccagagacaatgttgttgttaacatgaaaagtgaatttcaagttgtacttgctcccttctttcaaagtaaaccacatgccctttggatttccattctcaggaaccaagagaacaatgtcgggtcttccaggagatatgatggcgaggctatcaatcctcacttccggatcaagagtctctccaatgttggtgacatcaacacttccgagaagctgttccttccatttcctcagactctcatcatccttgtccttctcgagatgttctttgatagtgtactgaggacccaattgcaatttggaatcgtcgtcttcttcctcctcggtagcacaaagagaagattcgctcatctgtcgactaagagcatcgtcgtcggctcttgttctggaggaggagttctcatcatctccatccttgttgttcttgttgttgttgttgtcgtcgaaccccatgtccctggctccagataccaaagacatcaatcagctctctcgccctcaagaattttggtgtctttgtcggggtaag

SEQ ID NO: 175 - DNA, 1038 bp, Arabidopsis thaliana
ttttgaaaaaaaacattcggctgtgtattacaatgtgtaataatctcagttgtgatacatcttcatagcaaacaaagaatcagtggtaaacttaaaatttcagcggccgtgggagacaaaagaagagtcggttaactccaatgaactcgatgtattcacatcaagtagtagtaattccattgatgtctcaggccattctctaaatttctcagcccttacaacatcaagaagattatctggtagctgtgaaactccattcaaaatcctcattaccacactcatagccggtcttatcgatgcagcttgatgcgaacacaacacacctagcttcaaaacaagctcaacttgtcccctgttttgttcttgacgtatactttcctctgctgcatcgaaaattttcccattttcccaaagctctaagatccaatccacaagatattcttcattttctgctgcacgtctctcaattatccttctaccacacactacttcaagcattaccaacccaaaggcgtaaacatcagtgcttgtggttgctcttcctgttcttagaaactctggtgcgatatatccgaatgttcccgctactttagatgtttccaagtaagccgttcttgattctcgctacggtttagatacttgtcaaggcttccattaggcatatagtcatacaccaagtagagattctctttatgcctacagtatcctaaaagcctgactaaatttggatgtctgagacgaccaatggtcgatatctcggctagaaactcgctcatcccttgtcttgaatcatgagaagtccgcttcacagcgatctctgcatcagaacccggaagtgttcctttatagacttgaccaaagcctcctttaccaagaagttgtttctccttgaaaccctttgtggcattgaaaagctccttataagcaaacctatgaggtccatattgaatctcccattcttcaagaacctctttaaccttcttatgcctcaaatagaagacgaaaccgatccacgaagcgacaaacgcagcaaacaca

SEQ ID NO: 176 - DNA, 1038 bp, Arabidopsis thaliana
aatgctccataaaccctactcttcttcttttacctccagcttcgattataccattccttgtttgtgaaggcattttagttggtaaggatgataactggatacagcacgccaagtgcacatgttctaatgagctctcgggcattcaagtcatcatcatatagagctgcagcaggacagactcaacattatcttgctcgaagttcattgcctgtcgtaaagaactcgtggggatcaccaccttcacctttcaatgagcttccgagagtgtcaagaggtgtgcctctgtcatatctctcagcctcgtcttctctgcttctgaatggagaacaaggtagtctatctggtacattacctgtgttacctgtccgcagaaaaactcttttgactccacgagcgtcaaaagatgtaccttctagcttccgatttcccccgatgaccaagaagccacaatggtggtggagaactttggcttgcctgccttacctaatgccactgcatgaaacttggatgtatgcagaaaccgcttaccatctccacccattcctagaagattttgaattcttaacctacccatttctaggcgccataggaagattaccaagctggttcctcatggcttacttttttgtagcttatctagggatagtgcgaagaaaagaatggcctcacttcttcaggttccatgtagtgatgggtatgctgcttgaaatcgcactccaggttatagggaccgttagcaagtggatgcctcttggagtctattggggtaagtttgggatgcatttctggactgctgttgcgtttgcttatctgtttaccgtccttgaaagcatacggtgtgcacttgcgggtatgtacgcagacatcccgtttgtctgtgatgctgcctatatccagattccgtacgactaagaagaaacaacattggatcgttatgactcctctttttttttttttttttttttgttaattaggtccttgttttgttgttacaatgactcttcttgaatgacaattatgtttgtaatcaagcggccg

SEQ ID NO: 177 - DNA, 1038 bp, Arabidopsis thaliana
ttttttttttttttttttcatcgagaaggtttttttcattatttagtattctacgtcccgtaaacaaagatccaactcaatattactataacaaaaacaaacgcattacaaacttataaaaactccattgatttaaattatttcgtttaacaaccatcgtcatataaaggttcaaggacatttggattttccaccacgtgtcttcatgttggcgtaacaagatccacacttctccttattaccgtaggtgcctgggggaacacacttgcagcggtagcagcacgtgacgcacgctctcatacatacgttcttcctcgagtgttgcccacacctcgtcccacataaaggcacgcaatctatccgagttcttacgggaggtggtgttggaggtttgacaggcggcgctgtaggtggtttaaccggtgtagttgggggattgtacgtaggtggttggaccggtggcgtcgtggtggggggtttaaccggtggagttgtggtgggtggtttaaccggtgacgttgggggtttgtacgtaggtggttggaccggcggtgattggactggtggcgtagtgggtggtttaaccggtgatgtagtgggtggtttaaccgttggagttgggggtttgtacgtaggtggttggacggacggtggtttaactgttggcgttgggggtttgtacgtaggtggttgtaccggcggtagtttgatcggaggagttgaaaccggaggttttactggtgtaaccgaagtagttggaggtttgaccggaggttttgtggtgggtggtttaataggagtagttggcagcgtgggtggcttgtacgacggcgtcggcggtttgagagctggcgacggcggtttggtagccggagatggcgatggaagtgttggcgttggtaaagaaactaaggcgttggattcctcatttgaagcagcaaaaacaacattggtaaagacatggaaaaagataaagactgaaagaagtgagagagccatttttgtgggagatgagaaagtggtgaagtcacacgaaga

SEQ ID NO: 178 - DNA, 1037 bp, Arabidopsis thaliana
  misc_feature (1)...(1037): n = A,T,C or G
ctttttttttttttttttttttgaaatatgtgtaatgcttataaaaagagattgatagctcagtgcagtcacataacattgcaggtgaaagaacattacattctaaaaattaaaacttctttatttttttccaaaggatcattgtatcatcatattatcacttccacatgaagtttctctaaagcaaatgatttctcttctcttttctagttggctttcgaatcaatcaccttcttagcaaaagagggcaagcagaaagcagctgagtgaatctcagcgttgtaatacttcaagggacagtgtgatttgatagagctttcatcagtatcgattagactcactggcttcttgaaatcgacttgtggtccttcagatgaacaaagcatgaatccaatgactccactcgggtaagttggaacactggtccaagcgtagttaacagatcctttaaagatgtcacggcaattagaaacaatgtcttcaatgatatccatgtgaagccacaagctttcagcttgtgtgcacacaactccaccaggacgaagagctctattcactgactcaaagaaaggtttctcaaatagctcttttgctggaccgattggatcagatgaatcaacaataactgcatcataggttccttcagcagcgttcttcaagaaagcaacaccatcgccaatgatgaggttgacacgaggatcctcgtatccaactgctacattagggaaatactgcttagccacatcaaccaccattttatctatttcacaaatgtcaatctgctcaacagaactatgacgtgccacttccctcaggactcctccatctcctcctccaatcaccagtanntttttggggttggagatagagcacaaaggaagatgagtgatcatttcttgatacgcacattcatctctctcagtgagttgaatcactccatccaaaaccaaaacctttccatatgttgcagactggaaaacaataacatcctggtaatctgatttcccttggaatagaatcttctctaccttgagaga

SEQ ID NO: 179 - DNA, 1036 bp, Arabidopsis thaliana
tttttttttttttttttttttttttttgatgaactagtattatacatacatacatacatcaaaagcatttgggtgatacacattagtttgaatgattcgagtaaacatcatcgagatctgatatttgatgatgcaaaagaaaagctgtagcttgacgcatcaaacctaaagtgataagtttcacactttgggtctatgccatcaagttatattcatctctttcgattaatacagagtttgtcggcttctatcgttcattccttcttgttttcctttcccttatctgcttctgataataatgtctgctcgtatacgaattgagtgagcagtgggacaaggatagctccaagaattgcgacttttctccaatccggtgaagaaacgaaggaatcagcaattgcgagaaccacaatcccaattaacccgaggtaaatattccttcttgactttgatcctgcactttctttggtaacctcttgtattttctcagtttcctctctagcttgctctctatccactggttttttgtcacgtaagcttttaaagaacaatccttcattcctgtctacttgaatcttctcctcaaactcagccaacttattatcgttctcctcgatctctaatctgttcaatcccgcagattcctcaaaagcttgcatcttgctttcgatattctccagtatccttgtgctagcttcgtcaaggtctttcatggcgtcttctccaaccttgtcaaactccgcattggcttcttcagcaaacttggtgagatactctgatctctcgtccaagaaatccgtcaaacggaccttcgatgtctgaatcatggcgatcctagctaagagttcttgcctgcgagtatcgccttcgggttttggagggtcgggatcagaatcagaatctgaagttccgtctcccgatttggagagacagagaaattggggtcgggaaagagaatgtctcgaggcattgaaaagaacatgaaagtttggtgttaaggttgtctgaaatgcatgaagtgtgttcatcatcttct

SEQ ID NO: 180 - DNA, 1036 bp, Arabidopsis thaliana
ttttttttttttgttttaaggtactatattattagaacaaaactacaaggggacggtgcttccccaacttgacgagattacattattacaaagcgaagaatgaccattaatttcctaatttattgatgcctttatactacaaaatgatgaatgacaaattggtgaaaaaaaataacttattggtggtctagaccagaatctcaacatgccatctgaacatttcctccctcgtcaccggcagattcaaagtcacaagcccaacctcggcgtcgtacgtgaaatcagtctctgtgctttcaacggcgcattttagaggacgctgagaagagtaagctccaaaacgaccacagcctctgacactgacagataccagagctgttggagaacggttatcgctgagcgcgggagaagccgaggagatctctccatcgaagaattcaggattcttgtcggtcacgtgattgatatcaatcgactcgattgctccacttgagttgaacatgtctacaagtcctattggtgcgaacgaaatgttttcagtgatttccttcaaaggagagatgtggaagagttcatattcaaggactttgagggtgagaggaattgaagcacctttaggtagtcttaccacctcacctgatctgtatgcatagactattgaatctccactccaatcttcaccagccacttgagagattagatcagcatcatccgcacggattgaacccgtgagtgtgccaggagaagtatcatggatctggttcttcttcgtttccttgcaccaaccagcaccttgacaattgaatacaccaacaataccagtaaacttattcatgttccagatcttgagcaagctgattccatctctagctggatcagcgaataagcagtcacgggtaggcctacccgggagcttagcccgaagaactgaaccatcaggaagaaccagcttcctcaatagatcaaagttgtggttgcctggcttatcactgacatagattgcgcatccacccactgcacgcgctgcagcatggta

SEQ ID NO: 181 - DNA, 1035 bp, Arabidopsis thaliana
atgggtgctactgtagatttattcttcaggaaggaacttccgctaaggggttttgatgacgaaatgagggcactagttgctagaaatcttgaaggaaggggcgttaatctgcatccacaaacaagtttgactcagttgacaaaaacagaccaggggatcaaagtcatatcgtcccatggggaggaattcgtggcagatgtcgtcctatttgctactggcagaagtcctaataccaaaagattgaatttagaagctgttggtgttgaacttgatcaggctggagctgtgaaggttgacgagtattcacgaactaatatacctagcatatgggctgtaggagatgccacaaaccgaattaaccttacacctgttgcgttaatggaggccacctgttttgcgaacactgcttttggtggaaagcctactaaagcagaatacagcaatgtcgcctgtgctgtattttgcataccaccactagctgtagtgggtctcagcgaagaagaagcagtagaacaagcaaccggtgatattctggtcttcacctcaggctttaatccaatgaagaacaccatttctggacgccaggaaaagacattgatgaagctaatagttgatgagaagagtgataaggttattggagcatccatgtgcggtcctgatgcagctgagatcatgcaggggattgcaattgcgctcaagtgtggagcaaccaaagcacaatttgatagcacggttgggatacatccatcttctgcagaggaatttgtgacaatgcgcagtgtgaccagacgcattgcccacaaacccaaacctaagacaaatctatgaaccgcaaaatataaagagctatatagcatgaaaactcggtacacttagtttgatcaaagagtcagacaacgatgagtttaatcatactcgtgtcccaataaaggatttgtaatttttgtttgtttgtatgatgcttctcttcttacttacttgagaaaacatcaaggtttcttctcttattgcttagtggaactttattacaaagaa

SEQ ID NO: 182 - DNA, 1035 bp, Arabidopsis thaliana
  misc_feature (1)...(1035): n = A,T,C or G
ccacgcgtccgatttcatcgaacacttggtgatcaatatttgaaaacgaagagcacagccaaaattcgataaaccctaaggaacagtgagatggagaagaagaaagcaatgcaaattgaaggttacccgatcgagggattgtcgattggtgggcacgagacgtgcatcatatttccatctcttcggatagctttcgacattggtcgttgcccacatcgcgcaatttctcaagacttcctcttcatctctcactctcacatggatcatatcggtggattaccaatgtatgttgctactagaggcttgtacaaaatgaagccnnnaacgattatagtacccgcatnnattaaagaaactgttgagagtttattcgaagttcacagaaagttagattcttcagagctaaagcacaatcttgttggcttggacataggggaggagtttattataaggaaagatctcaaagtcaaagcctttaagacataccatgtcatccaaagccanngttatgtagtgtattcaactaaatataaactcaannnnnnatatatnnnnctatctggaaatgaaattaagaacttgaaggcttcaggtgttgagattacagacagcataataactcctgaagttgcttttacgggagatacaacgtcggattttgtagttgatgaaactaatgctgatgctctcaaggcaaaggttctcgtcatggagagcacatttcttgatgattcggtatcggtagagcatgcgagagattatggacatatccatatatctgagatagtaaatcatgctgaaaagtttgaaaacaaagcaatcctgctaatccacttttcggctcggtatacagtgaaggaaatcgaagatgcggtttctgcattgcctccacctttagagggacgtgtgtttgcactaacacaaggattctaaacattataacactcttataggttttacatacttttgtttttgtattccacatgtaaacattgtattctgttgttaattttaagatttcttctatcaaaaaaa

SEQ ID NO: 183 - DNA, 1035 bp, Arabidopsis thaliana
taattcacattccctggttttctcaattatagttattaaaccgtacaatacaattgcacaaaagccttccagagatattacaactccaacaacaaacccaaagacacataaatgatcaatcaatagacaaagattcatctaaaaatgatccaacggccagaaacccattacgatgcaaattaaaaaagcaaatcacgaaaaattcatcagattaacaacgttgaatttgacgtcttcagtaatcggtggtaggcaattgctcgtgggcattttcatcgatgaagacaaagtcgtagataattccggcgagtccaccaccaataagaggaccagcccagtaaacccagtggttggtccacgtccagcttacgacggctggtccgaaagcaacggctgggttcatggaagctccgctgaaagctccaccggcgaggatgttagctccaacgatgaaacctatggcgattggtgcgattgttccgagactaccgttcttggggtcaacggctgtggcgtagacggtgtagacgagcccgaaggtcatcacgatctcgaagacgagagcgtttaatgatccgactccggcagagagaccgaacgctggaattggctcgccaccggtggcaaagctaaggaggaaacaagcggcgacggagccaagaagctgagcaatccagtagagaataccacggaggagagtgatgttaccaccgagtaagacaccgaaggtaacggcagggttaacgtggccaccggaaatgttagcgccaacagagacagcgacaaagagaccgaaagcatgagctaaggcagcggcgacgaggccggaaggagtggtggctccattgtcagtgatcttgttgaaagcaattccggagcctgatccggcgaagacgaagatcaaagtcgagataaactcagcgagcgccgccctaagtgcgttggggtggtagacctcttcttggactccaccaatggcgatgtttctggtcggcatgatcggagaaagatttaacggctgaggttaaaagcttt

SEQ ID NO: 184 - DNA, 1033 bp, Arabidopsis thaliana
  misc_feature (1)...(1033): n = A,T,C or G
aatcgtaaaataaacgacgcaaaactcagaccaaacaacatccatctacacaggcaggagtcatgtttatcaatgtatagaggaaaaaataagtcgttgtttaccttacacaaagctcaaatttggagtattctttagtcgatcttcttgctcccgaacactttcattttctctggtaaaatgccattgatgaacataaaaattgatgataccaacaaaaccttggaaacagcagttattatgacggaagatgatccggtggttgcaacaaagttatgatagagagtaatcagaatgactatggcaatgagagtctgctttttccattgaattgtttcagtaacttctgttttgggttgattttgagctttcaagtgtgagaatgaatctattgtcctctttataccttcctgaagtgggacaacaggagaatagnntaaacgatnnnntgcttttgaagaatcaaatgttctgttgcaagagagtagcctaaccctagaaggtgttagcactggtactttcatcccatacggtccgagtaatttatatgctagnnnnncaagatatgctattggcatcatgagacttgcaggtatctttatacttggnnnctcatagccaagtccttcaagaagctgtgacataaactcccaaaatttaattggctccatgttggtaatgaagtaagcctggccagcagcttttgcacatacttctcctcctgatgctagagctcgctcagcacagacatgggcgtgcacaacattttcaacataagtgaaatcatagaagttactcccatcacctataatgaacttggatttcccagccctggcagcagtaacaagcgatggaaccattaatttatcaccaggaccaaatatgctgctaggacgtatgcaacaagtgagtagtccacttcttccattcgctttcaaaatcaaagcttccccttcagctttagtagctgaatatgaatcattatgcttaggtggatacggcagtgattcatcagcattcaaagtagcggccg

SEQ ID NO: 185 - DNA, 1033 bp, Arabidopsis thaliana
  misc_feature (1)...(1033): n = A,T,C or G
gagaggtgctccaagcagcaggtttcttatctatttgaacaaacatatcatacctgtttttgacaagctcccagaagagaggaaacttgatttgctcaaagcacttgctgatatttctccatacacaactgctcaggaagcaaggcagctgcttccttcaatcgttgagcttttaaagatatacatgcctgctagaaagactggagaggaaatgaacttcacatacgtcgagtgtttgttgtatgcgtttcatcaccttgcccacaaggttccaaatgctacaaacagcttgtgtgggtacaagattgtgaccggccagccatcagacagattgggggaggacttctcagagttgaacaaagactttactgagagattaaccattgttgaggatctaactaaggcaacgatgaagaaattaactcagggaatgactgagcacaacaaagccatgtcggctnnnnngacagatgaagagaaagcgagtattaaaacaaannnnnagaatactacaactggacttaggacctgtaataacatattggcgatgacaaagccattgcatgcaaaagtgccaccttttatcggagacactaatctcaacctgtcttggaaagaagccacaaagccgttagcctcaacaacaacaacaattggaggaaagcggcctgctaatagcaacaatggaagtggtaacaatgttgcagcaaagaagggacgtgggtcgggtactatgcaaaaccagcttgtgnncaaggcctttgaggggatatcatcctatggagctggtagaggcggaaaccgaggttggggaagacgtggaggtggtcgaggaagaggacaaggaagaggtcactggtaataacaagtttccagtagaggattccatgactgtgtttctgtttctgtgtctgtctgtcagtacaagttttgattttggtacttagtagagtttggagacttctcttctcatatcagaatagatcatctgtgtttttctctgttcactaaagatatttcgagcattagaaaa

SEQ ID NO: 186 - DNA, 1033 bp, Arabidopsis thaliana
  misc_feature (1)...(1033): n = A,T,C or G
ctgttttcttgttctgttcttagctaatgcagcttttgccgtcaaattcaacttcgattccttcgatggcagcaacttgttattccttggagacgcagagcttggtccttcctctgatggtgtaagccgatccggagctttatccatgacccgagacgagaacccattctctcatggtcaaggtctttacatcaatcaaatcccattcaaaccttcaaacacttcttctcctttttcatttgaaacttctttcactttctccatcactcctcgcaccaaacctaactccggtcaaggtctcgccttcatcataaccccggaagctgataactccggtgcttcaggtggcggatatctcggaatcctcaacaaaaccaacgatggaaagccagagaaccacatcttggctatcgaattcgatacttttcagaacaaagagtttctagacattagtggtaaccatgttggagttaacatcaactcaatgacttctcttgtcgctgagaaagctggttactgggttcagacaagagtcggtaaaaggaaagtttggtcgtttaaagatgtgaatctgagcagtggagagaggttcaaggcttgggttgagttcagaaacaaagactctacgattacggttacactcgcgcctgaaaacgttaagaaacctaagcgnnctttgatcgaagctcccagagtgctcaatgaagttcttcttcaaaacatgtacgccggttttgctggttccatgggacgtgccgttgagcgtcacgatatttggagctggtcgtttgaaaacgccgccaaaaacaactaaaccggtttggttctgtttataggctaagtatcgtttgttttgtttttacttttttagtaattgctgcatactactcagtggtaactagagtgaataattatggtttgaataaaacaagccaagtgcgtggtttcattactccggattgccatatttgtattcagtctgattaattcagatatctcaataaaaagaactttgttttcatgtaaaaaaaaa

SEQ ID NO: 187 - DNA, 1033 bp, Arabidopsis thaliana
  misc_feature (1)...(1033): n = A,T,C or G
tcgcaaaccatggccgtcgctgtagctaagcttctgatctccgccatggcggttttcatgcttgtttctgcttcgttcgcgacctcggaagtgccgttcatggtggttcacaagaaagccactctcaacaggctcaaatctggcgccgaacgcgtctccgtttcctacgacatctataaccaaggatcctcgtcggcgtatgatgtgactctgacagataatagctgggataaaaagacttttgaagnnnntaatggaaacacttcaaaatcatgggaaagacttgatgcaggaggtattctgtctcattctatcgaattggaggccaaggttaaaggagtcttctacggtgctcctgctgtcgttactttccgcatccccactaagccagctcttcaggaagcatactcaactccactactacctctagatatcctcgcagacaaacctccaacgaaacctttggacgtggccaagaggttgctggcgaaatatggatcactcgtctccgtgatctccatggtggtttgtttcatatacttggtggcaacacctaagtccaacgtatcaaaggcaagcagcaagaagaagcgttaagttagtgaaatgaaaggtgagaaaggttggtacggtgctgttttctgtttaacagttaaacacagtttcaaaacttgtaagaattagagaacacactttaattttggtgttgcagaggacatacttcaagttcaaagagttattttggttttacttaatctctttgtgagagcatagtcatggagttctcttttatttgggttatgccttttgcttatggttttggtagcattatcttttacacatgttgataatctttgttgtgttaacttgtgtttgtttctgtctagtttcattgcctgttctgtttgctttgtagtctgtttaataccacatttttatttgttgttgttgtagagtctagtctggttattggttaagtattatgatttcgcctagaagtttttttctgttttgataattgctatgttttctt

SEQ ID NO: 188 - DNA, 1033 bp, Arabidopsis thaliana
tcgagcggccgcccgggcaggtaaaaaatcaaatctctctctttctctctctaatggcggcgacattaggcagagaccagtatgtgtacatggcgaagctcgccgagcaggcggagcgttacgaagagatggttcaattcatggaacagctcgttacaggcgctactccagcggaagagctcaccgttgaagagaggaatctcctctctgttgcttacaaaaacgtgatcggatctctacgcgccgcctggaggatcgtgtcttcgattgagcagaaggaagagagtaggaagaacgacgagcacgtgtcgcttgtcaaggattacagatctaaagttgagtctgagctttcttctgtttgctctggaatccttaagctccttgactcgcatctgatcccatctgctggagcgagtgagtctaaggtcttttacttgaagatgaaaggtgattatcatcggtacatggctgagtttaagtctggtgatgagaggaaaactgctgctgaagataccatgctcgcttacaaagcagctcaggatatcgcagctgcggatatggcacctactcatccgataaggcttggtctggccctgaatttctcagtgttctactatgagattctcaattcttcagacaaagcttgtaacatggccaaacaggcttttgaggaggccatagctgagcttgacactctgggagaggaatcctacaaagacagcactctcataatgcagttgctgagggacaatttaaccctttggacctccgatatgcaggagcagatggacgaggcctgaggatctagatgaagggggggagggttgttacgcgatgtttctgccaccaaatcgatctcaaaatccccataacctttgctcaaaaactgtgaaaaaagattgaagtgtttatgatgattatgattgtgcacagcttgatgatttatctactctactaaacctctgtgctcttaatatttattgtctcgactctgctcaagccttaaaaacatctttctccttaaaaaaaaaaa

SEQ ID NO: 189 - DNA, 1032 bp, Arabidopsis thaliana
  misc_feature (1)...(1032): n = A,T,C or G
ctttttttttttttttttttttagaccgaattaagcattaaacccaaagtttttttaaatccaacaaacgttttacaaaagctgatgcagataaatttatctataatagactgtcagatcttgcaggtagcctcctgaagagattgagcggcacagagggtagcttgtgcctgaaccttggatgcctcagcacatagatcccagcaagaagtgcaacaacctgaaacggcgtaacatacaacacgatagcagctatgagacagaaaagcacaaacaatgtggttgccctcgggtctctccagctcagcagcgataaaaaccgctctccctgtgttgctagatcgcctatcacggtctgaacccgtcctcctatgcttctgagccggtcatatcgcatccgcacaatctcagaggatcgggaagtcgggaaagtatcaaactcttcatcaagctcgtcggggtgaacagcgtctgcatgggacaaccgtgtgtccatgtgtggcgggtgccttggtctccaccggaaattccagatcccaatcaagaaaaggtacaagaaaaccgttgggaggattaattccgggtaaagaactaagataatgaaaagaacatgaatgagaattgtggttattgggtttctccagttgcagatctgatcaaaccattttccaacagcaatgagaccactcagaacattcatgattctgaagaagttagctttactcctcctcatgctccacatatgggagtcaacatcgagcatgtactccacaatctctttgcgaagaggcggctctgcgcggttcagccttgccgagacaatgttcatcgcctggtgtctcaggctgtccagctggagaaccgataacggatnnatgtnntgcatnntgggtagtaatggctgagaatacatatgaagcatgttgatgagagataggcaagtgaaccgcacagctaactgtatttcacctgtcttcttgatcccagaaggatgaaagacgagtagcggatatgaatgagtgtagatacggt

SEQ ID NO: 190 - DNA, 1032 bp, Arabidopsis thaliana
tcgagcggccgcccgggcaggtcgcgtcgcgccttcttgtcttctctctcaatccagcatattcctacgcaaatcccttatcgttttcatgtttgtcctggtttaaatcttcaatctcctacccggtcttttcatcctccgatggcattccttgttcgttcgccggagatacccaccgtctcggcgagaatcttctccgatgcgaattcgagtgttattagtcatgtgtttatgaggaggaaggctacggtttcggcgattgacgccagagatttgcctggtgttaagaatccgaaatcgagattgtactggcaattctcagctccggtgaaagaagactacaagattagcagagaggaggaagaagaagaagaagaagataagcagagttactacgtgaatatgggtcacgccgttcgtagtatcagagaagagtttcctttgttgttctacaaagagcttaattttgacatttacagggatgatattgttttcaaagaccctatgaacactttcatgggaattgataactacaaatccatatttggggccttacgtttccatggaaggatcttcttcagagcactatgtgtggacattgttagtgtttggcaacccacagagaacactctgatgatacgatggactgttcatggaattcctcgtggtccgtgggagactcgtggtcgattcgatggtacttctgagtataaattcgataagaatggcaagatttatgagcataaagtcgataacatagccattaattcgcctccaaagtttcaaatgctcactgttcaagagcttgttgaagccattagctgcccttcgactcccaagccgacctactttgagttcggagattgattcatcatcatcgtctgaaacatcatgctggtgttatgtatactagtagtcttttgtgtggttataaatagagtggtactgtaatatagatgaagaaggaacgatttaaaataaacccaatagcatgaatacattacacgctttttttgcgtataataatcaata

SEQ ID NO: 191 - DNA, 1031 bp, Arabidopsis thaliana
  misc_feature (1)...(1031): n = A,T,C or G
agagagagagagaaggagggagagaaggagcttagtggtctcattaccattaccagctccatacgaaccgaaacgacgccgttcgctcaacccttttctctgcaatctctcttcctcccacgagtttctcagcttttctcggatcatctaattaagagaggagatcttgtctcacggtgggattgatttttctcttcacgaagatcgtgttccaggcaattaactgcagaaaatggtgatgtgggtctttggctatggctctcttgtgtggaacccannatttcactacgatgagaaagtgttaggtttcatcaagggatataaacgtgtctttgatcttgcttgcattgatcatagaggtacaccagaacaccctgcaagaacttgcaccctcgagaaagctgaagaagccatatgctggggtactgcattctgtgtccgtggaggaccagaaaaagaacgtctggctatggagtacttggaacgtagagagtgtgaatatgatctcaagacaagtgtagacttttacaaggaagatgatcctctaaagccagctgtaactggagtgatagtattcacttctactcctgacaaggtctccaacaagtattatctcggacctgcgccattagaagacatggcaagacaaatcgcgacagccaatggaccatgtggtaacaacagagattatctcttcctgctcgagaaggcaatgcacgacattgggcatgaggaggactatgttatagagctggcaaacgaggtgaggaaggttctggccgagtcctcgactaagaaggtgacaccggtgaaggaatcaagagcaagccgtgtagctaacaagtcgaagaacaatgtccccacggctcatcagatactacctcatcatccagaagctgttgccactacaatataactcttgtagttttcttcttaattggctttagagatgagtgaaatcaggtcttttttttaataataataacaaagtaagtttgttttctgagtaaaaaaaaaaaaaaaaaaaaaag

SEQ ID NO: 192 - DNA, 1030 bp, Arabidopsis thaliana
aacaagtagaaactttaaaacgagagagagagaaagaaatggcgacatcgggaacgtacgtgacggaggttccgttgaaaggatcggcggaaaaacactacaagagctggaagagcgagaaccatgtcttcgctgacgccattggccaccacatccaaaatgtcgttgttcacgaaggcgaacatgactctcacgggtctatcaggagttgggactacacatatggtatacatttagtcatttacttatactttctctctatatatttatcacttttacggcctatgtgcgtccgaaactatggttttggtggtctactgccaaatatgaaatactacatatgatcattaattaaggaatttgttctataagaccaaaaacatatataataatcatattttgcatttatgtttacatatgaaaacgaaagtcatatgtttaaaagtaaaaagtattttcatatttgagaataattttgaaaaatataaacggaaaaacatgatagtcagatattaatccttatggtataactagctagtgggatgttggaaattgtaactaataaacacatgtgtgtaagatggaaagaaggagatgttcaaagagaagagagagatagatgatgagaataaaacattgacgaaaagaggactggatggtcacgtgatggagcatctcaaagtatttgatatcatctacgaatttattcccaaatctgaggatagctgcgtctgcaaaatcactatgatatgggagaagcgcaacgatgactttcccgaaccaagcggctacatgaaattcgtcaagcaaatggttgttgacattgaaggccacgtcaacaaagcttaaccacaaccatcaccgtcatcactatctcgatcgatattgtattattatggtgtcttttcgataatcaatataataaagggggtcttgtggagtttctattctctgtaactgtttggttttggaatatgctgtgatatgttgttatgctcatcatatatcggtttcgatataatgagtatta

SEQ ID NO: 193 - DNA, 1029 bp, Arabidopsis thaliana
  misc_feature (1)...(1029): n = A,T,C or G
attttgacaattaaaaccaaaaaagacaatctatatttatatttaaacactcttaattagcgaaaccaaaaccctaacaaaaccaggtaataataatagaagacattttttaacactgaggaagatcatgaggaggaggaagcagagtttgtgaaggaagaggtccatctttnnngataaaccccattgctaaaccccacgaagtannnnnntctagatgacagtgaataaaccaaactcctggattatccgcatttatcctaatcgccgcccatcctcccgtcggcactgcaaanntattcctctccggcggatccaccaagttgtaccttttcggatccttctccgggtcanaattcccaaatcctcttcccactacgaagaaattgtgtccgtgtacatgtaaaggatgattctcgatgtttaagaaactcgttccctgaaacacgatctctaatctcgatccgaattcgacttcgaaaagcttcgtaccgaattctgtgttcatgttttccgatannnnntctactcccgtgaaatcgaatctgttcggtggtttctctgggaaatcgagtgagaaaactcctttgctctgtttcttatagtagctttcgaggatcgatatcggaggtctgacaaatgagatgttgttcattgatgcgaagaatctcttccctgcgtaaccgtcgcaggtctgatttaacggacaatcctggagattgagacttatcgtggtgatcactcgcttgtctatcttcgtcgggactttacatggatacttcgctgatcccagacttttgatgctatcggagaatttcgtcgcgaatttcgtatccagcatattcgggagagctacgactgtcgacattgccgttaatcgccgtctccgccgtgtgtttacggaattttccggtttggttttaccggtgtaacggatgaatcctacggtggttgagttgttgaaaggaaagacggaagtgacgtaaggagttgcggcgatgagaaattcaccgccggagagttggtcgg

SEQ ID NO: 194 - DNA, 1028 bp, Arabidopsis thaliana
  misc_feature (1)...(1028): n = A,T,C or G
tttttggaaaaaaggtaattttgagcttgtcaaaactgcattattgctagtgaatgttatgcactacagaagtaactttgtaagataaataattgttacatgagtttgagtatgaggtttctggtttcatgttcctgtcttacaattatacaaggctaagtaagcttacattctttgatcacagacccgaccgtgattcatctgagcccaccacagcttctgattagatcaatcatcctgtcagctcctccatttggccccgagcaatgtatggttccgcatcagtacgtttgaggaaatgcatagaatgacgggcaaaatttgttgttttgtcactcagcacgattccttcatcaatatcatccaaaattctgaccttgatataaggatctnnnggagggaccatatcgacattcaactcgattcctacttttcccatgtatgattttagagcaaccgaatggtttttgaagtattccttctctagtgtagtgagcttctcttggatttcagagggaaggtcgagaagttcaagccctactctccatgccaaatcacgcacaatttctgctcggttgtacacataagccatgaggcagcgcttgttccggatcaaagcaaggtggtgaattagtgctccatagtggtcagcgtttctgttgttctgaacatccaaannnncttgttgcattttccttatcaaggactggataagatggtgattctggtcacactcttcgattgtttcatcaaagagtttgctgttgaaaggtttgagctgacccttctctccggtggcaaaatctttgataagctgatacccttttctcccgtacatgtcgaatcggcgggtctcctcgcttcactttgacatctattcggtttgtggatgaagcaaatcgttgctgatgtcgccgaattaacggatgataacaaaaccgtagatctaaacaaaacgtaccatactgttgcggagatttatatgcaatcaaaacaatgtcaattctcgcggcggcgaaggatttcca

SEQ ID NO: 195 - DNA, 1028 bp, Arabidopsis thaliana
tgttagagtcggagctaacaagtttccggagaggcaaccgatcggaacttcggctcagagtgacaaggactacaaagagccaccacctgcgccgttgttcgagcccggcgagctagcttcatggtccttctggagagctgggattgctgagtttatagctacgtttttgttcctgtacatcactgttttgactgttatgggtgtgaagaggtcaccgaacatgtgtgcttccgtcggaatccaaggtatcgcttgggctttcggtggtatgatcttcgctctcgtctactgcaccgctggtatctccggtggacacatcaacccagcggttacgttcggtttgttcttagctaggaagctttcgctcacacgagctgtgtactacatagtgatgcagtgcttaggagctatctgtggagctggtgtggtcaaggggttccagccaaagcaataccaggctttgggaggtggagccaacaccatagctcatggctacaccaaaggaagtggtcttggagctgagattattggaacctttgtccttgtttacaccgtcttctctgccactgatgccaagagaaacgctcgtgactctcatgttcctattctagcaccgctccctatcggattcgctgtgttcttggttcacttagcaaccatccccattactggaactggaatcaacccagcaagaagtcttggagctgcaatcatcttcaacaaggacaacgcttgggatgaccactgggtcttttgggttggaccattcattggtgctgcacttgctgctctctaccacgttatagtcatcagagccatcccattcaagtccagaagctaaagctgattgagttctatttaaaatctggcttttgttcttagtttgctttcttttgtgaatctactacctgtgtgtaacgtgtgtatctgttgtcctcttctttgcctaatggagacttatgtaaaacaaagacatgccccagaaacatctgttatctttcttctccattttatcagaggatttctat

SEQ ID NO: 196 - DNA, 1028 bp, Arabidopsis thaliana
  misc_feature (1)...(1028): n = A,T,C or G
tttttttagctcaaatattgttcaatttccaaggactgttcatctcaaggtatacagaaactataagtatgaagaatgatgatctaattttgtacccatcttcggcaaaggctgcggcatcatctacaagatcgggatcaaagcactttggttggccgcccgctacataaagagggtcccctaccaagggatgtcccatgtatgcaagatgaatccggatttgatgtggtcttccagattgtatctctaccttaacaagcgagcaatttttttccctgtccctctccagaacaaatactttactgaaagcaggtttcccttccggagaagcaacatataatccttgtgcgaccccaggatatcgaaccactcctataggctgtttgattactacctcgtcttcttcaactataccatctgctagtgctcgatatatctttgatagttttcttcctgttccacactcttgatccaggttgccggagccgacaagagatgttnnctcagcaaaatacgctgcaagtttcgtttttgccagcttggtctttgcacagagaagtatacctgaagttcctctacccagtcgatgtacagggacaggatgtggtgattcacgcgatccgatgtaagagtcatttttaccaaaacaccactgcagctgcgtcaacacagtccgttgctggaaaagtcctccgggcaatacttgaagtccagaaggcttgtttaaagcgatcaaatcatcatcttcatacaaaacttcaagcgagtatggcgtgtcaggttccttccaaggaagcctactgtaaactaatttcgaaccactcctaagaagtgtgttgggatcttttacaacttcaccgtcaatttgtatctgtccgttttggattcgttgaatccaccctagcaatggagctgaactcttgtatttggtgaagtagaattctgacaccgtcgttaactctgattcagaagaagagatggcatccttgtatgccaaaccatcgttaagctcaggccatggcaagccg

SEQ ID NO: 197 - DNA, 1027 bp, Arabidopsis thaliana
  misc_feature (1)...(1027): n = A,T,C or G
tacgattcaggagctatggaccggtccgatgttcgtccaaagatcgtggctaactgtttgcagagatccgtatctctggtctatcttcgatctggagccatggttcgattcctatcccgagtcgactcacttgtggtcccctgagttcgagcagaaggtagactcaatgctacgatcagtcgttgattggagcgaaggtggtctcactgagatccgcgtccgccattgcagcgaccacgctctctcttacgcagccgatagatgcccgaatctacaggttcttgccattagaagcagtcctaacgtgacagacgcatcgatgacgaagatagcgtttcggtgcaggagtttaaaggaacttgatatcagttactgtcacgagatatctcacgacactcttgtgatgattggtagaaactgtcctaatctgaggatcttgaaacgtaatcttatggattggtcttctcggcacattggctctgttcctacagaatacttagacgcttgtcctcaagacggagacacagaagctgacgcgattgggaaacatatgatcaatctagagcatttggagattcagttctctagattatctgtcaagggtcttgcttcgatatgtgagggttgtcccaagctagagtacttggacttgtttgggtgtgtgcatttgtcaagccgtgacattacaagcaacgtgtcnnnncntaaatggcttaaggaggtaaagaagnnagatgtgtatgtgccaaggtcaggggatgtggcgcagacggagaggtatggacattggagactctatgacgagagatttgacatacaagccatgagaatctgatttctacacacacactgccatgttttataataaagctgcccatagttctgacttgggtcggttgtttgttatatgtagtgttgttaaaatggaccttaggcccacgggtctaaacgggctatttgtaatgtttgaacgggtacccatttaaacccgattactaacgggtctaaacaaatattaaaaaaaaaa

SEQ ID NO: 198 - DNA, 1026 bp, Arabidopsis thaliana
  misc_feature (1)...(1026): n = A,T,C or G
ttctgaatcatggcgttgagcaccagcatcagatctgtatctaagatcattgcttcttccgaagcatcagtctccagatctggtcagtaccaatagaagtatctgctgaattggttttgcatttctttgtttttccccttttttgttgtctagggttttgtttgatttcccaggaatcgattattctaaggttttgtttgattgcctagatatcaatgtttctgattagccgcggattgattccgatgcgattcttcgttgattgaattctgggatttgaaacttctctgctcgcgaatttgtcatagaaacacgctttaatggcgtgatgcgaaacagattgtttatgattaggctgaaaaattgtatcatgaaattagaaatgcatattttgatgtttccttgtttcatggaaattttccatgttcgtgttttgatagttttggttgatcagtgaaaggctccatgttcatgctatgatcagcnngttttgatgtatctcnngaaactaaatgggctataagatgatttatgagtgtttgattggtaatatttcaaaacttgctgaagatttctttgatatcatcaacaacagtgactagaagcttccactcgactggagttaagaagatgagcggaggaggacatggtggttacgatgaatactacctccacgcaaaacacatgtacaatttggaccgcatgaagtaccaagctctcaagatgtctctcggtgtattcaccgctttcagcatcggtgttggggttcctatcttcgcagtcgttttccagcagaggaagactcaatctggttaagtccctcaggatgctcttgttcacagcttgaataatttgtatgaattctcaaactctgcttttgcaagagagtttttctttctccctttggatcttagccacaagtcttatcgttatggttaagtcttctgtgtcttcctcttttgctggctgtttgatgctgtaataatgataatctgacagatatatttttttttactttgattggaa

SEQ ID NO: 199 - DNA, 1025 bp, Arabidopsis thaliana
  misc_feature (1)...(1025): n = A,T,C or G
ggcaaccgcagctctctccgccgcccgacccaaccgccttagctcagcctcctccgatgttcctctccaccccctatatctccctaccaagctccaatttccttcccgtaagactcagctgtggcgctccnncgcgattctcttacccacacggcggcgatgcgctccgcctagagctagttctcgcgccgacgattctccacccttcgatatgtctgtggagacggcgcttaaggttctcggagtctccgaaggagcttccttcgacgaaattcttcgtgccaagaaatcgatcctggcttctcgtaaggacgaccccaacgccatctctcnnnctgaggctgcatatgacatgctgctgatgcagagcctaaaccaacgccgagcaggaaaagttgtaagcaacaacattcgctacgctgatgttaaatctagtaaccctctgggaacaagtactgtgactcagtggatgaagaatccacctgtctctgttgatatgccttccacgagcgatctcgggatacaagctggagtctatggagccatgatggttttgacttatgtgaatgggagttnctttgaatcttctgggatgccttatgctggtgctgatgtgcccggacttatattggctagcagctttggggcttccctatactttatgaccaaaaagaaagtcaagctagggaaagcagctgcgttgacggcaggaggattagtggcaggtgcagtggtgggatcagccattgagacctggctgcacgttgatgtggttccgtttctgggtctccactccccagctgcagtcgtgagtgaattcatagtattctctcagttcttggtgtctctatgcttaaggtagaactttgtacattggcttatgcaaatttggctcaacctgtcacgctggtatatgtacttcgtttatatgcattttgtacagaacactcaaaagtaaacaactcctagacatccattttcatactcattatctattccttggaactctgaagtttctgttaaaa

SEQ ID NO: 200 - DNA, 1025 bp, Arabidopsis thaliana
ataaacccttcaaattgcaagtaacaagtaaacatgatgaatatatcacaatttataatttaacaatccaaaaaactaacaaatcgaaatttagcaaaagctttttgattttgattacattgatttcattcatagtttgagtacttcactaagtaaggatctaaatttatattataaaagccttaaataaagatttgttcttttcaagacgattccaaaataagatcagcaacggcggctccggcgagatcagcggcggagagagaatgattatgatctccttcataagtaacaatcaacatggacgaatcatcagctgctctctcaacatgtttacgtgctggacaacctcttacgctactacacttataatatcctcttggatgtggagatcctttaattggtttttgtccgtatttcctccatgaataatcgtccggtggtacatcggacatttttgcacttatcgccggaaccctaattattctcctctgttttatctttcttttcttcgagcaatgacaacgaccggaggaagaagcggaagcgcattttccagtgagaagattctcagagttacattttctctttgttgattttgagaaagacgagaccgtcgtggagaggctttgagtttgagacgcaaacggcgccgtttcagagggacgttgatgatgatgaatcttcttctggttgtctgattccgttgttacagaggagagagatgagaaatcaatcgttttcatcgatgaagaaaacgaaccttttcggatcatttgcggcggaggaggaagaggagactgaaacggcgtcgtttttggttcttcttgtaaaagaaccggagaaataacatgaaccggagcacgtctaaaccgggcgtgtccggttcgagttcgatctaagagagatatgactcttttaaactttgaaacagccgcgtccgccgttgtgttacgagctgattcaagatctgcggcggcggaggcggaggcggaggcggaggcggaggcggaggcggaagaaga

SEQ ID NO: 201 - DNA, 1025 bp, Arabidopsis thaliana
cgacacttttcagtttttgttttaacaagtagagtttcccaaaatattggatatatttctttttcaaatttcggaaaagaaatgagttgcaatggatgtagagttcttcgaaaaggttgcagtgaaacatgcatccttcgtccttgccttcaatggatcgaatccgctgagtcacaaggccacgccaccgtcttcgtcgctaaattctttggtcgtgctggtctcatgtctttcatctcctccgtacctgaactccaacgtcctgctttgtttcagtcgttgttgtttgaagcgtgtgggagaacggtgaatccggttaacggagcggttggtatgttgtggaccaggaactggcacgtatgccaagcggcggttgagactgttcttcgcggcggaactttacgaccgatatcagatcttcttgaatctccgtcgttgatgatctcctgtgatgagtcttcagagatttggcatcaagacgtttcaagaaaccaaacccaccattgtcgcttctccacctccagatccacgacggagatgaaagactctctggttaaccgaaaacgattgaagtccgattcggatcttgatctccaagtgaaccacggtttaaccctaaccgctccggctgtaccggttccttttcttcctccgtcgtcgttttgtaaggtggttaagggtgatcgtccgggaagtccatcggaggaatctgtaacgacgtcgtgttgggaaaatgggatgagaggagataataaacaaaaaagaaacaaaggagagaaaaagttattgaacctttttgtttaaaaccgacgacgcaaaacactcaaagattttgaggctctcttttttagggttttgagtgggaatggatatttagttaatgatttttctctatcgagaaatatgataaaattttggggatatatattttgccgatgagaataaataatctgttgagaattgtttcattgctaacatatggtgtgtatgtttttttttccaagcttaactattcaaatattata

SEQ ID NO: 202 - DNA, 1024 bp, Arabidopsis thaliana
  misc_feature (1)...(1024): n = A,T,C or G
tcaaattattccaaaaatctatcagagaaatggtacaaacacaggaaatgcaacgttatatggttacaggtaccaccagaataacatataaaaggcgtaaacgctgcaacaacagttctattcaatggcggcataaccattctgtgtcatggagcgctcagatggcaagttagtgttgtctttcttggttccttcgactttccaaagatcccagactttggttttaggaggaggagtaccatctccaattggagcgattagtcccggtttcccatcatcgattacagcgtcgatcaaaccatattctttcgcctcccatggattcaagaagttatcacggtctgtgtcactttcgatctctgattcaggcttcccagtgattctagagaagattttgttaagtttaatcttgtggtacatcatttctcttatacgtatgctcatttccgttgctttgcctccagcagtaccaagtggctgatggatcataactttagagttaggcatacaataccgtttcccttttgaaccagaagcaagaagaaacgcacccatagatgcagctaaccctaagcaaacagtagatacatccgccttacattgtttcattgcatcatatattcccatcccagcagtaatagatccaccgggtgaattgataaaaagcgtaatgtctcttnnngagtcctcagcatctagtaacaatannngacttataaccaaatccgccgtcatatcatcaacctgagaacccaaaaagacgattctttgacggagcaacatgttggtggtatcgagttcttcgaaacttgggagtcttgaaggagattgagcaacggaatcaatggagaagctagatacatcccagttactagataaggtttgtctgggtggtttagacaagctcattgaagacctaacgcaaaagggttnnnaagttttagggatnnnntggtttcggattgggaaattaaggttttttccagggtttagtagacaaattgggtttgaggttgaagatgaa

SEQ ID NO: 203 - DNA, 1024 bp, Arabidopsis thaliana
catatgacaatatacattttacacactactcacaaccaccaccactaaagaaaaaactaatcaagacaaaagaaaaacagattaaagaaaaaatctaaagattctcctccttccctttatccagacgccaactgctttcttttcttttcttttccataaaaaacgctcactaatttcaaaaagcacacctatttccaatctttttgatatattattaatcgtattcgtatattatatggtttataagatacgatccgatatctagtgggtggagttttagccttttacgctatgagatacacctcatggagaaacttgagactgatgaatccacggcggctccggcgaaaaccctcgcgtgatcgctttcttgaccgtaatccatcatcggacgatactccagatcatcatcgtgatcgtatacaaactccggcatctctatctcattcctcctcacatgttcccacagataatcaactctgcttatgtacctcagcttcccgtacaacccgccggaaaatagaaatcggccgcaggtggcgaggaagagacgtgattgaagacctggatggaggaagtaaacctcctgaagattgtctctgacgtttaccggaattgcgtcgtagatcgctcgtagagctgagatacctgggaagttctcgcttctctgtacgccggtgtggacgtagagtacggcgaatggttttctacctaatcgaggaaatatcttctcctctagatacttcttcaacacatccagtgacagaaatcgagctgggaagaatttgccgataatacgaaggatcttacggccacgtttgtctctgccatggatcttgaagatctcaagcttctcgatcagctgctcttgttcaatctccgaaatctgagaactcatcgtttctctctctctctctctcttttttgtttcgtcggtgaaattcacagttgaattatagaagaagaagggaacaaaaattgaggcgagtgaagaagaagatgacctgcccgggcggccgctcga

SEQ ID NO: 204 - DNA, 1023 bp, Arabidopsis thaliana
ctgatttgtcaaatgacaacattatcattaaatcatagaacttactccatatagctttataacaacaaatgtatctgacaactttgttgtatgacaaagcacaacataaaacaaatcttattgctactacaacttaatccctacttcctcccagattcatatgtctgagatgagactttatttaaaagcttctgaggccaaaagatacccacttcccggctaagtaaaatgtgaacataaagaaaacacagaagatgcaccaatggagaaatggttccactgaaacgctgaccttacaaccgtgagctggcttgtttcacgggagcgctcaaaagaactcctttagatcccctctcagccaaaaaagcacaaggcttgaagaattcaccataagccttcgaccactcatccagcctcgagtaaatgtatttcgatccgatggaatcagcccagaacatgattcctcctctgtaaggtggaaaacccattcccattatgccagcaatgtcaaggtctgctgctttgacagcgataccttcagcaaaaaccctacacgcctcgtttactactgggaagaatgtcatttcaataatgtccttctccgacaaattcgccaacttagggtcaagctttactccagatatgcttcttgccttttcgatatatttctttagctcaggatcaggtttcgccttgcgcttatcatcatacaaatagaaacctttgcgagtggcttcaccagctctcttgtcctcttgcataagtggaataatcattgatttgtaagtccgttctgagaagttctcgataaactgcgttgcggttgcaatcgccacaccaaatccaaccaggtcacacagtctgaagggacccattggcattccaaacttgctgattgccctgtcgattagatatggatctgctccacactcaacaaggaacatagctgcctgtgtgtaagggaagaacatcctattcactgcaaaccctgtgcagtttcccaccacaactggtgttttctta

SEQ ID NO: 205 - DNA, 1023 bp, Arabidopsis thaliana
  misc_feature (1)...(1023): n = A,T,C or G
tttttttttttttttttataggtaaatttcactttctaaccaaaaacacaaatattttttagttacatatgcaagaaaagactcccgaagactagaacattgtgatataacaaataagagactgaacattggccacatcatacatataacgcagatgatgaattgttggtatttgggggaaagaaaaccatcatatatagaagaagacattttacattctgaggaatgctttctcgaattgtgtccacttctgctccaatgtacccacataccccaccgacattcgtacaagaccaggagagatgcctgcagcttccttctgtgaggggtcaagctcgctgctagtgctgctcccggagcaagacatgagtgtctcgtagtaacccaaactgacggccatgaagccaaactgagtggcgttctggagatatgccatgagcttgttggctttctcctctgtctccatgtctatcgacagcaatcctccgtatccatagtctctattcaccatccctttgaatagcttgtgctgcgggtgggtctcgagccctggatatatgacttncatgcccanatcnnnnnttctctccgcatacacnngggctctgtggctgtgctctctcatgcgtaggcccaagtgagggattcgctcggagagctcgaaagccaccttggcgttcatggtgggacctagaagcatcagagatccgccacgaagatccatcatctctttcaccaaattctcactcccacacacggcccctgcgatgatgtcagccccaccactgatgaacttggagatactgtgaaccaccacatctgctccaagcttggccggagacagcaccatgggggcgaatgtgttgtccaccaccaccgtcacgccctnctcgtgtgccatacggctcagctcaggtatgtcagccacagtcagcgtcgggtttgccaccgactcaaagtagagaacctgtgtcctaccctcaacgatcgcgtttgccacggcgccatggtccgttatgtcaa

SEQ ID NO: 206 - DNA, 1022 bp, Arabidopsis thaliana
  misc_feature (1)...(1022): n = A,T,C or G
attttgtgaatttagaagtttacaatagcaaaaaagaaactttggtcgacttttatcattcatcgttccacatgtctgtaaattcatcaggctccaatgggtttgagagttcatgcatctttcttcttgtttttgcctttattttcttagcaaatttcccagctttatttcttttctccaaagctcgaatctggtttggagatacatagaatgggttctcgtaaagcgttgtacctccaaagctgcctccaaatatcttaattggatttaaacaaaaccttggaccaacctcaataagagtcattttatccagatcgcctcgtgcaatcttgtctgactcgttatgaggtaccgatatctggtaattacggaaccatatatggtcatcaacaatggagaaaacaaacacatggtcatggtaaggtttagacttcctatgtccctcgggaattccaaaaatctgagttaacatctctttcagaagtttccagtgtgcatcgttttcaaaattggatgagaatgtcaaaagtgggcgtgnnnnnntcagatgatttccagtgagtttcagctcctccattgtgtgaacagcattaaccaagaacttaacggaaggtccaccaggggacttcaccatccacatgtaaagatctttgtgcttcctacactcgaaaaacaaacaggaagaagagcccttaagctcgatgagctcattaagagtggcacctctactgctcttagcttctaccttactatccttcttacagtgaggtaaaagtgacaccatgttcaacatcaaatgtcgatacctgaaattgatccgacgggaacaagtaacgagaaccttctctttattcctgaatacagacgcatacgcaggtttagagttctcagcatcttccttcttatctttccaacccaaaagagtcctttgaggtctctccggagcagaatccttcaccggtgccgccgtaacagtctcgctgtgctttctcttcctccccattttttgtgtctattgaaga

SEQ ID NO: 207 - DNA, 1022 bp, Arabidopsis thaliana
tttttttttttttttttttgagaaaatatctattgaatatagttgttttttaagaaaacttggaaaacgagtctgttatcataggtacacaagtgatgccgaaaaggtaacatcatcttgatagttctcaaaagctcagtttcattttccattttttacaagagacaaatgaagaaagcaagcagagcattgttacgttgtgttgctttcactcaagcaacactgaaagaagtggctgcgctctcgacaaatttcctggctcccttgaaccacctcttgtctccagcttgtgctttgcagatgtaaagcttccctccattcacggttgctgtgatcagctgatgcttcccaccttcgtctccatcagccgttcttgtcaacacagacaagtaatagtagggtttcccaccaacttcctgagatgatgactccagaatgtttgctgttgccactgcattgttgtcaaagcctccctcagaggcagtctcaccgaagtaagcttgtttccctaggaggtaattaacctgagagaggaactcttcgggagaaccgtaatcagtgatggacttcttgtcggtaggagtgaccatgacattgagattgctagtagcatcgaagttgtcttcgaacctaaggacttgtcctggatactcaatctctttgcttgggttccattttgctggaacctgcactttgaacccatctccattgtatggcaagaagtctgtgttcgtctttggcttcccaaacacgtttgcagcttcaccgtaggcggcatcagcaggagatactttggaaccaacagcagcggcgccgacgaggagagtgagagcaagacggcgggagacggcggagttatcgtcttcatgagactgttgagctttacagatgatctgaacaggtttggagagcgacacgtgacgctgggatgaggaggaagatgatgatcgtgcggctgatgaagccaatgcgctctggtgtaggaaacacgcactgtacgccattatctctgtctctctttc

SEQ ID NO: 208 - DNA, 1022 bp, Arabidopsis thaliana
  misc_feature (1)...(1022): n = A,T,C or G
gcatgtcacttaacaccgagcagttgcagaatctatgtgataaaatgggaaacaaagaaggactagaattggcaaaggtgatcaaagatggatgcaacagtagtagaaatgatgaagccgaatctaaagaaaaagaaagtaagaagaccaacggtggcacagagcctacaacccgagtttcacagttagatagtagcactcagaagaaacaaccatggagcaaggaagagattgatatgctgagaaaaggaatgataaaatatccaaaggggacatcgcggagatgggaagttatttcagagtacattggtacaggaagatctgtagaggaaattctgaaagcaactaaaacagttctcctgcaaaaaccagattcagctaaagcattcgattctttcctcgagaagaggaaaccctctgcttcaatcacatcccctctctccacaagagaggagctcggagaatctctacccacaatgacgaccacaacaaatgcaaagccctctaaagagactgttgtggggaaaagctcgagcagtcaaagctcagacaacaatgnnnaagtaggtggaagttcagacgcagatagttggtcgactgtgcaagaaagagctttggttcaagctttaaagacattcccgaaagagacaagccaaagatgggagagagtagctgcagctgtccctggtaaaacgatgaaccaatgcaagaagaagtttgcagagcttaaggaaatcattagaaacaagaaaaccggagtatgaggtaaaatcatttcggagtcccatgagaattttgggttttaatcctcttggggcaccgttactttgcgagaagcaagacctaaaacttttttattatttgtaatgattcatttccctttgatgtctctatatattgagagtgctggagccactattatggagtatgtttttttttacataatcttatgtaacgtttgattagcgtctagtttcaagttgtgaaataaagcgcatcgctcataaaaaaaaaaaaaaaag

SEQ ID NO: 209 - DNA, 1022 bp, Arabidopsis thaliana
  misc_feature (1)...(1022): n = A,T,C or G
ttttttatttaaaagtgttggaagagattattattacaccacaacaaaaaagacatgattcaccagtttggaagacaggagctgaagtggtttataaatagattttgtacgaagtttctctacacaaacctttattatacaaatggaaaaacaaaagaaaattcccaacttcacaattctctgagttttgttttcacgcaaccaatcctgtttgtcttctctcggtatgatttaagttccaaataagataagaatggagcaacatagagcttgttttaaaaggtttagcttgtggagtcgcggctgtagaattgatcaagtgttttggcaggaatacggtgaagaagctcacgtgggaagatacggagcagtgtccatgccaagtcaagcgactggaagatgttccttgtatcgtatgcgccttgcatcacaaacttcctttcaaatttatccagaaactctaaatacagcagatcctcggaagacagagcttcttctccaacaacagctttcatggcttgaacatcttttccgattgcataatttgcgtatagctggttggacacatcagaatggtctttgcgagtcattccttcaccaatagcactcttcatcagccgagaaagtgatggaagcacgttaatgggtgggtatatctgtctgttgtgaagttgcctatcaatatatatctgaccctcagtaatgtaaccagtaagatccggagtagggtgagtgatatcgtcattgggcatagtcaggatagggatttgggtaatggaaccctttcttccttcaatacgtcccgcgcgttcataaatagttgcaagatctgtatacatataccccggatatccacgtcttccaggaanttcttctcgagcagcnnnaacctnnngaagagcatctgcataagaactcatgtctgtcaatataacaagcacatgctttccacattcataagccaaatattcagcggttgttagggcaattcgaggagtgataattctctcaatggttggatc

SEQ ID NO: 210 - DNA, 1022 bp, Arabidopsis thaliana
tttttttttttttttgtactaaagaatatgctaaaagatacacaagattcgaagaagaggtaaaagtagagctaaaagacacgacttttctgggctctaaaatctgttaaaaagctttcttctttttctgtgcaatttcgtacttctaaaaacattcctcctacaaatcttatatttcgaaatcaacaaaataaaattaacttattccctgaaatattaaaatctaaaaagttaaaaaaaaaacataaacttcttcttcttcttcactgtaactttacccattcgtaacgtccttctaatggcttctccttctcgaaatcgaaattgtacttcttcttgaatttttctttgagttgtttctcagcttccacaaaaaaatcttcaatttccgattccgttggcatctccgtcatcaatttcgccttctcctcctcctccgccgtcaccgtctcctccatcgttttcctcccgctacaacaacaatctaacgattctttaaccgccgattcaaattccgatgaataattctccatggatttacttaattcttctttctcctcctctctcagattttcaaaaagcttcctcttcgtacccctaaaataactcacaagcaagattctaaatttattgaagagagagtcaaataaattaccgggaaaataataaaaccttcaaaattcaaatcattttcagttttttttttaacactcaccgtcgatacgtcgacgtttcagtgtcaccatctttatcttcctcctccagatgtattaattctttcttcttatattcattgctcccactacaagacgatgaaactccattatcaccgacgacggagacagagcttgatttttccgatctaacataaacaattctccggctccgtagctgcatatacgttgacgaaactccagcttctacaattcctttagcttttctatattttctcaccatcttcgatttaggttacgtgtgcgtgaagtcacaatctctgtgagagagagagatcggacgcgtgg

SEQ ID NO: 211 - DNA, 1021 bp, Arabidopsis thaliana
ccacgcgtccggagaacaacaaccaaacactcatttctccacatcttgagagaaaaaaacagagcaagtatattagagatctcatggcgatggcggtctccggagctgtcctcagtgggcttggttcttcgttcctcaccggaggcaagaggagtgccaccgcattggcaagcggcgtaggcactggagctcagagagttggcaggaaaactcttattgtcgctgctgcggctgctcagcctaagaaatcttggatccctgccgttaaaggtggtggcaacttccttgaccctgaatggctcgatggctcgctaccaggagatttcgggttcgacccattgggtttggggaaagacccggcttttctgaaatggtacagagaggctgagctgatccatggccgatgggcgatggcagcggttcttgggatcttcgtcggccaggcctggagcggtgtggcatggtttgaagctggagcccagccagacgcgatcgctcccttctcgttcgggtcgcttcttggaacccaattgcttctcatgggttgggtggagagcaaacgatgggtcgatttcttcaacccggattctcaatcggttgagtgggcaacgccatggtcgaagaccgccgagaatttcgcgaactataccggcgatcagggataccccggtgggagattcttcgatccgttgggtctcgccgggaaaaaccgcgacggtgtttatgagccggactttgagaagctggagaggctgaaattggcagagattaagcactcgaggctcgcaatggttgccatgttgatcttttactttgaggccgggcaggggaaaacgcctctcggtgctcttggtttgtgagaaaacggcatgatgtttttgattctgtagatacaatttctcttccaaaaacctaatgtttctcttcttcaatgtgacatttgggaaaagatcatcaaaccattgctataaatgtaaaatgaaatcatgaggcttgttcgtagaaaaaaaaaaaaaaaaag

SEQ ID NO: 212 - DNA, 1019 bp, Arabidopsis thaliana
ctgtggttgagccttacaacagtgtcctctccactcactctctcttggaacacactgatgtctccatcctcctcgacaatgaagctatctatgacatctgtagacgctcccttaacattgagagacctacctacaccaacctcaaccgtctcgtctctcaggttatttcttccttgactgcttctctgaggttcgatggtgccttgaatgttgatgttactgagttccaaaccaacttggttccatacccaaggatccacttcatgctttcgtcctatgcaccagtcatctccgcggagaaggccttccatgagcaactctcagttgctgagatcacgaacagtgcctttgaacctgcttccatgatggcaaagtgtgacccgcgacatggaaagtacatggcttgctgtttgatgtaccgtggtgatgtagtccccaaggatgtgaacgcagcggttggcaccatcaagaccaagcgaactattcagtttgttgactggtgtcctactggattcaagtgtggtatcaactaccagccaccaactgttgttccaggaggtgatcttgctaaagtccagagagctgtttgtatgatctcaaactcaaccagtgttgctgaggtgttctcccgtattgatcacaagtttgatcttatgtacgccaaacgtgctttcgttcactggtatgttggtgagggtatggaagaaggagaattctcagaggctcgtgaggatcttgcagcattggagaaggattatgaagaggtcggtgctgaaggtggtgacgatgaggatgatgaaggagaggaatactaagaagaatgtttcttaaaaattggattttgtgttgggttttctctattatctcgtgttgtgatgaatgggctcgaaactcttacgagtcttagttgtgtgtttttctaaacctatatttctatctcttgctggttgtttgatttctattatctagttcgtttgtgtattgactcatgtttctggtaatatctttcttactaaaaa

SEQ ID NO: 213 - DNA, 1017 bp, Arabidopsis thaliana
attcgcggccgcgatcagaacacaatgttgtactataaaatcttttgggattttcaaacatagattgaagcatgcgaaaatggaagagtagagaaatcacaaggtatatgaacatgatgactccattttcccattttcttctcagtcgtcatcttcatcatcactcctccttcaccttcaccttcactctctcttttaccgccaatcattaccaccgattcacctcctaagcttccggcgaaaactgagcttcctgtcatcggaagctgtatagattgaagatccagtttcaaatttctcgaatcatcgttagtttcccatcgacgttcactctgtaaatcagtgtctgtgaaacaccataacgtagaggagcttctaaagtctccggcggtgcgacctctcgggctagtatctggaaatcgccagacgttgtcgattctcgaccatgaatctgtcgctggatcgtaaatttctccgtcagatcggaatcttccttgagattccgttccgtaaccgctcagcacgcaaaaccttagacccgtaccaacggcgaatccttgacattcgtctcttccttccgtcatcggagtaaccgacgaccactcgtctttctcgacgtcgtacacctccgccgagcgtaaagcgtttttctgatcgtcgtgacctccggcgacgtataccttcgttggacttacggaggcgcaggcgaagaatgatcgtgattccttcattggcgcacctcgtctccacttccttccggcgaattccagaacgtaaacgtctctcgtcggctgtaacgtctccggatcccaaccgccgatgagcagaatcttcccggcgtcctgaagcacgacgcactcgcagaaaagcgggatctgctcctcctctggaaacgcaacgcgatgccacgtggacatcgcagcgttgtaaacgctcaatccaaaacgcggcgtgcagaaaacgcgcgggtgtgactcatcctctgattttttctcgtcaaccattaatgtctcgtca

SEQ ID NO: 214 - DNA, 1016 bp, Arabidopsis thaliana
  misc_feature (1)...(1016): n = A,T,C or G
tatggagcatctggatacttcttggaagcagaggcaagcaaaaagaaaccatcagaaacctctaagcttactgaagtgactgtgagcgataagctggaaagtcttcgagcttcaaaagagcattttagaggtttaagctttcctactatatcatcggttggttcaaacgctgctgttattcattattcaccagagccagaagcttgtgccgagatggaccccgacaaaatttacttatgtgattcaggagcacagtatctcgatggaacaactgatataacccgaacggttcactttggaaaaccttcagctcatgaaaaggaatgctatactgcggtcttcaagggtcatgttgcactaggaaatgctcggtttccaaagggaacaaacggctatacacttgatattcttgctcgagctcctttgtnnnngtatgggtnnnnttatcgacatggtactggtcatggagttggttcttacctttgtgttcatgaaggacctcaccaagttagtttcagaccgagtgccaggaatgtacctcttcaagctaccatgactgtaacagatgaacctggttactatgaagacgggaactttggtattaggttggagaatgttcttgttgtcaatgacgctgagactgaattcaattttggcgacaagggctacttgcaattcgagcatatcacttgggcaccatatcaagtgaaacttatcgatctagacgagttgacacgggaagagattgactggttaaacacatatcattcgaagtgcaaagacatcttagccccatttatgaaccagactgaaatggaatggctcaagaaagctaccgaacctgtaagtgtatccgcttgatcccctcccagatttctcttaaatagatgtttatcaatggctccttcacttctctcactagtaaaccaaaaacattcaagtcatacacagattattttctttagttttgcattcaaagttcatgtttctggaccacatgtctttattcatagcag

SEQ ID NO: 215 - DNA, 1016 bp, Arabidopsis thaliana
ctttttttttttttttttgtaaaatggttattgtttatgagataaatgcttgttttgtatgaaaacactgataatttggaaaacaaaaagatttaaaatttgttgagaacaattagcaatttacaagaagtctagcttcagaatcctccaatcattagaactgtttagaaatctataatcgtttgaggacaaaaactccacatccaatgcctagaaaagttgctatggagaccccaaaaacaccagagagaatcccggggacgacaagagaagtccatccttttgcggttgccatggcacacgcagtggttgggcctccgatgttagcatttgatgcaagaagtaatagcttcatgtcgatacagaatagttttcctagaaccaaagtcactgctagatgaaccattacttgaatagcagcaaataagaagatacttggggcagtgttgattacattccatacactccctgtggctcctagaattgtgaaaaatacctgcatgagaatgagagagatggtttcagcagaaggtgccagagagttgaagaaatcagggaaggatgttgccaagacaatggtgatggctgttactgcaggaagcataactccttgtatcttaaatagcgtcgtcaacgtaattgcagctttgcatatcaggaaggaaactgatagtgcaattgaagttgaaaccactctgttcttgtcctcgagcttgtcatccttagtcatgtcagcatcaggggaagatgctgaggcggtctcagggggtatctttgaggccaacgcaaacaaaaccatgaagtgaagagcacatatgacattatccacagctacacccgctgctataacagatggagatatctgtagagcctccgatatcgcaacaaaattaagggatccaccaatgtaactccccataagagcagctgctattttccagttatccggaccaagcgatctcatcggtaccaacataaaagccaccactgttccaacaatcgtcgcaacagatcca

SEQ ID NO: 216 - DNA, 1014 bp, Arabidopsis thaliana
gcagacaactttatttgcaaaacagagtttttttttcttttcttgagaaagttcaacagaagatgatgttggagaaagacgatctgggtctaagcttaggcttgaattttccaaagaaacagatcaatctcaaatcaaatccatctgtttctgttactccttcttcttcttcttttggattattcagaagatcttcatggaacgagagttttacttcttcagttccaaactcagattcgtcacaaaaagaaacaagaactttcatccgaggaatcgacgtgaacagaccaccgtctacagcggaatacggcgacgaagacgctggagtatcttcacctaacagtacagtctcaagctctacagggaaaagaagcgagagagaagaagacacagatccacaaggctcaagaggaatcagtgacgatgaagatggtgataactccaggaaaaagcttagactttccaaagatcaatctgctattcttgaagagaccttcaaagatcacagtactctcaatccgaagcagaagcaagcattggctaaacaattagggttaagagcaagacaagtggaagtttggtttcagaacagacgagcaagaacaaagctgaagcaaacggaggtagactgtgagttcttacggagatgctgcgagaatctaacggaagaaaaccgtcggctacaaaaagaagtaacggagttgagagcacttaagctctctcctcagttctacatgcacatgagcccacccactactttgaccatgtgcccttcatgtgaacacgtgtcggtcccgccaccacaacctcaggctgctacgtcagcacaccaccggacgttgccggtcaatgcgtgggctcctgcgacgaggatatctcacggcttgacttttgacgctcttcgtcctaggtcctaagtctttttacttacaatcaaagggcattgtggtcgttttattaagtttcagggaccagatatgcatgtagttgttaacatgtatgtattttttttag

SEQ ID NO: 217 - DNA, 1014 bp, Arabidopsis thaliana
cttttttttttttttttttttttttcgactaattataatcatatataaataatcacacatgagccttagatcaacaattcaatctcgccgaaatctcaaacatttgctctaaactaactaatcaacaattaaaaaaataaacaaaaacgaaatctcacaaatcgtaataacaattaagaagaatctctaagacgttttagttgatcgcatcacaccttcgtcggatctctcctcgccgtccggtcaaaacaccgtgaagactcaacttctgcatagctccggcaaagtcgttaaagaaccgagattggtctctcgcgtataactcaacgaacggacgggttctcgggtcggagaataaaccgtgatccgattcaagtaacccgagacctttcggaatattctggaaatacatattatcgaatttgttcggagtcataacgtcgttgaagacagatatcgtagggtcatttttggaattcgaacaagctttctttaaagctaccgcgaatctcgggttatacccggtactattattcgggttgacccggttcgtgaactccttgcaatgtgagaatccgatggtgtgagcaccactcaaagcaaccatttcttgaacggagaagcctctggagctgaattgatcgatgagcttcgatatctgcatcgacgggagcgggaggagatcggagacgagagatgatttcgaagttcgtgaatcgcgacggccgagggagatttcgtagtaaggtccaccgacggttacgaggagatcacgtaccgcgacggcgatgatatcggagcaagagactgtgttgggacaagcgagttcgagagctgttttagctcggattactacgtcgaatccgtctccggggagagagagattgattgatgaatcgcgttcggcggtgttgaaagcggtggaagaaacgaggacggaggcgtcgcagccgttggggaaacagtcgtggaagaagaggcggagagctgcggcggcggttgttggagttgaga

SEQ ID NO: 218 - DNA, 1013 bp, Arabidopsis thaliana
  misc_feature (1)...(1013): n = A,T,C or G
atcttaagagttattgtatttcagacatattcactcaaagacaggctctttcttcttttcttatttctgttaaacgttaataacacaatttcgagaacttaagcacaaacagacagaagcattatcaccaaacaaaagacaatttacagaagaaagataccatttttctctcagactcggtagttttcgggaagaggcataacaccatcaaagaaatctccaaaatagccggatggctcatggacaagtcttgcaatgatgtctctaagagtgatgagtccttcaaggttaccaaaatcatccacaacatatatcctatggatcttctccgcgtctaacatcaagatcagttcctttagtgtatggttcttcgtgcaagcaatcacaccactcatgataggagctgatgtatccccgcacttctcaagatgctctctaacagatactaagaagttcttcgttgtgattgacctgtagtcatggtagatctcaggtgcagtgaggagaaattgaacatctctaaggcttatgttgcctactggcttctcgctattcctttcaatgacaggtatgcctccgattctctttctcctcatcagcttgaatgcctgaagaactggttcatcctcatagatctttatgatatggtcctttgacataatgggaagaccgacttcagagagagttttgattccccaatcctcaaaccagagaagccccgcgcattcngncagcatatgtataactcctgattgtgtgataatgttctcgatntttgctacacctaaatcaaccaccggnnngctcttcattttgtatttnnnannnagtaacagcatnnnnnaaaaggagttctctttctgcagagccaggaacggtgcccagcggaatgttccagagatatctcgaaccttggtgttcttgtatagctctgaagaagtaaggacctcaaagaagtttccagaagttactgctgaatctccgttatccagaacatcggtggtgaaatcatg

SEQ ID NO: 219 - DNA, 1013 bp, Arabidopsis thaliana
ttttttttttttttttttttttttttttttttttggaccaactgtcatctgatttaaacggtaaatcaccaaaaaatccaccatacaaacattacaaaaagcactactcagctattttttgatgggttttgaaatccaacaacataagaaaagaaatagactcacaaactgagacaagcagcgagtctgtaaaagaaacgggtcttgatgattcaaagcagttggactttcaagcagcttgctgggaagcaagtctcttcctggcttcctcaatgatggtcagcttaatacctttgccctttggaagagacacccatggctttgttcctttgccgattgtgtacacattccccaaccttgtggcaaactcatgccctgttgagtcttgaatgtggattgtctcaaagcttcccttatgcttttcacggttcttaatcacacccacacgccctctgtttctgcctccagtcaccatcacaacgttacccacgtcaaacttgatgaactcaacaatcttgttctcctcaaggtccagcttgatggtgtcatttggcttgatgagcgggtcagggtaacggatggtgcgaccatcataagtgttcaggtatggaattcccttctgaccaaactggatagatctaaccttgcaaagcttgaactttgcttcctcatccttgatggagtggagacggaaacgtcccttggtgtcgtagagaagacggaagttctcattggtcttggggatggatacaacatccatgaaaccagcagggtaagtcttgtcagtcctgactttgccatcaacttggatatgcctttgcatcaagatagagataacttcacggtaagtcaaagcatacttcaacctgttcctgatgatcaggacaagaggaagacactccctcgacttgtgaggtccagaagatggtttgggagcgaaggcaccaccaagtttgtcaagcatccaatgcttaggagcattgagcctctttagatgcttcttcaatcctctt

SEQ ID NO: 220 - DNA, 1012 bp, Arabidopsis thaliana
ctttttttttttttttttttttttttgagaacaagctcttattacatataatattcgaactacaaatacaccccttaagcaaatctaatgaaagaaggggtaattaaacaataacaaaacaaaatacacgaaactgatattaaaggtgattatctaatgacgaatcacaatcattctcttcaggttttcttgtttggcccgtatgcatacttaatcagagactccttgatagagagtagctcagggaactctttcttgagcttggaagcatccatctcgttgttgcttcttggagccacaatgactttagcttgctcctctaatgtgaagtttgcccatttgaattcagggttgatgtagtctctgtacatctctaggatctcgttgtggctcaccacacctgggtttgtgaagttccagattcctttcaagtttcttttcgccatctcgatggagattggtaataactcgtccaacacagtcatgctgtttgggatgttcactactttgttgtacctggagatcttggtgatgaagttgcgcgggttgtttagatccgaggagatcggcatccttaccctcaatgtgcatacgttgtcatactcctttagcagctcctcgaccatggctttggttttcgagtagaaagagccagtgaagttgggtgtgtcttcctccttgaagccaattcctgaaccttccggatgcttgtcgtcatattcgaatatacaaccagtagcgaaattcatcattaggagtccgtgctctctgcagacatcagctagagtcaatgtgccagctacattggcacggatagtctcggtcttgtgagactcacaccagtcaacattgggtctcccagtcacaccagcggaattgaaaacatgggttggcttaacactctgaatatcctgcagaagagaagatcgatcctccaaccgacctttcccatactcgtaagcaattccttgcttatcacatatctttccaagcagaccaccgatccatccgg

SEQ ID NO: 221 - DNA, 1011 bp, Arabidopsis thaliana
  misc_feature (1)...(1011): n = A,T,C or G
ttttttttttaaaaaatagacaagacttgtttcatcatcatcagttacaagaaagaaagaaatacacatttgtgttaaatcacataatcagaccactcggttaaatacgatgtctggtccatagtcagacaaggaatcttatcatgttttctcggattctctttcccaccaatcaacctcgccggatttccaaccgccgtcgtacgcgccggcacatccttaaccaccaccgaccctgatccaatcttagctccctcaccgattgntatattccccaatatacaactcccagctccaatcaacacaccatcaccaatcttcggatgccgatcaccactctgtttccctgttcctcccaaggtcactccgtgtagaatcgaaacattgtctccaaccaccgccgtctctccgatcaccacgcccgtcgcatggtctaaaagaatcccttttccgatcttcgctccgggatgaatatcgacggcgaaagattctgatactctgttttggatcaataaagctacgatttttctgttctgtttccagagggtatgagctattcgatgagcttgacaagcgaggaagcctttgaagcccaagaagcaatgaacgtagcttatacaagctgggtctctttctttgactgctataagatcttgcttcgtggattcgatgatctcagggctttcttctaaaacgcttatgaacagttcgaagagtgtgttgcttggtaggtttaaattgctgagctttacggagaggatgtgagctaaagcagactctaaagatcgatgagatgtgatcgaagcgtagtagtagtttgataaaatgggttcttgtttaacatcggatttggcttcttcaagcatcttgatccagacatcatcgtcatcttcgatttgggtgtggtgaatcttccggtttacagagaaaccgggtcgaaagaaattcttgatgcaacagaaccgggaatcatcgtcttgggtattaccggttcggcatgtgtctatgcat

SEQ ID NO: 222 - DNA, 1011 bp, Arabidopsis thaliana
  misc_feature (1)...(1011): n = A,T,C or G
ccacgcgtccgggacgaaccggtgtaccacgatttggttcgtcactgtctggcctacccaaaagcggatggaatcttggtgaatacatgggaagagatggagcccaaatcattaaagtcccttcaagacccgaaacttttgggccgggtcgctcgtgtaccggtttatccggttggtccgttatgcagaccgatacaatcatccacgaccgatcacccggtttttgattggttaaacaaacaaccaaacgagtcggttctctacatttccttcgggagtggtggttctctaacggctcaacagttaaccgaattggcgtgggggctcgaggagagccagcaacggtttatatgggtggttcgaccgcccgttgacggctcgtcttgcagtgattatttctcggctaaaggcggtgtaaccaaagacaacacgccagagtatctaccnnnnnggttcgtgactcgtacttgcgatagaggtttcatgatcccatcatgggcaccgcnngctgaaatcctagcccannnnnnngttggtgggtttttaacacattgtggttggagctcgacgttggaaagcgtcctttgcggcgttccaatgatagcgtggccgcttttcgccgagcagaatatgaacgcggcgttgcttagcgatgaactgggaatctctgttagagtggatgatccaaaggaggcgatttctaggtcgaagattgaggcgatggtgaggaaggttatggctgaggacgaaggtgaagagatgagaaggaaagtgaagaagttgagagacacggcggagatgtcacttagtattcacggtggtggttcggcgcatgagtcgctttgcagagtcacgaaggagtgtcaacggtttttggaatgtgtcggggacttgggacgtggtgcttagtaatggttactgttttctagctctttagtggttgaatttacttgtcgtttcttaatgtgtatttttcattgtaatagaataatcgatgttttgtaataaaaa

SEQ ID NO: 223 - DNA, 1009 bp, Arabidopsis thaliana
tccgcgattctcaaagtcaagcaaaaaaaacgaaacaatggatgcgttctcttccttcttcgattctcaacctggtagcagaagctggagctatgattctcttaaaaacttccgtcagatttctccagccgttcagaatcatcttaaacgggtttatttgaccttatgttgtgctcttgtggcgtctgcctttggagcttacctccatgtgctctggaatatcggcggtattcttacaacgattggatgtattggaactatgatttggctcctttcatgtcctccttatgaacaccaaaaaaggctttctcttctgtttgcgtctgctgttcttgaaggtgcttctgttggccccttgatcaaagtggcaattgatgttgacccaagcatccttatcactgcgtttgttggaactgcgatagcgtttgtctgtttctcagcagcagcaatgttagcaagacgcagggagtatctctaccttggaggactgctttcatctggcttgtctatgctaatgtggctccagtttgcctcttcgatctttggtggctctgcatctatctttaagtttgagttgtactttggacttttgatctttgtgggatacatggtggtggacacacaagagattatagaaaaggcacacctcggtgacatggactatgtaaaacattcgttgacccttttcactgactttgtagctgtgtttgttcggattctcatcataatgttgaagaactcagcagataaagaagagaagaagaagaaaaggagaaactgaggggatgtaaagtaaatttaactttatggttgttatcgtgtgtggccactttgaagatattacttgttagcactctctattggtgaccagacatgtttccactaaaaaggatctgcttgtttcacttctgcacaagtaccatcttcagattgtaaatgactcgagtgttgttcttcttttcataaacttttgttctttaagagtttggttctactgattgcatcttac

SEQ ID NO: 224 - DNA, 1008 bp, Arabidopsis thaliana
  misc_feature (1)...(1008): n = A,T,C or G
ggccgccctttttttttttttttttttttttttttttttttttttaagcacacaaacgcatcaccaccgtaggattagttttgttccatatcaatggcttaattgtacaaacacataaataaaagcatataagaaagaagaagtgtgcaacaagacaaaaggaattggtaaacaagaaagttcaaagtcaactttttttgggttcaacgtcacaaatacgcaaagtaaacgactcatttgctttgctctatcttggccttcctcttctcattgacaaagaagacgacaagagccacgacggagaagacactgaaacagatggaggcaatatctagggacgcgtggcggccactgatagcctgaacgctgaagagattggttttcttggcatcgtcggtgctctgtccataggcaacttcatggccaatggcatcaaccgcgtaggcacgaacgaagtaggttccggtggggatgtcacgctcaagagtnnaagtagttgattgaagtgttttgtcataaggcttggctatgatcttgtgtgggcaggtcttgtctttgaagagctcgtcatgggttttgcgccatggtcggtcaacttggctaggtggagcgtagcatagcttaactttgatgatcttaaattcagcctctcttttagacccaatcgagcttagcgtccatgtaatgttcaacgtatccttgccggcatccaaaacaacacctggtccttctcggctgggtttagtggtgacatcaagtgcacctttgtccagctctttgaagagtcttactttttccgccccgtggatggattggatcagtgagcatatgagaagtgaagcaaagaggatcttctggatcgccatggatatatccttgaaacctttcgaagacttgggaagattgtgttccctctctggcacaagtgtctgtgttgtctccgtccagctgagagatggctcctaaacatgccaaaggatgagatatgagtatttgttttatccggac

SEQ ID NO: 225 - DNA, 1008 bp, Arabidopsis thaliana
  misc_feature (1)...(1008): n = A,T,C or G
cgacttcctcttcctctgactttgagcagctctgtcttcttctcgaaatcgtctcctgtttcttctgctttcatggatgcttcaaatcccaattcttctagaaaatctaatgtctcttccttcgctcagtccagtcgaagcggtggtagaggaggaggatatgagagagataacgatcgacggagacctcagggtcgtggcgacggtggaggcggaaaggatagaatcgatgcacttggacgactcttgacgagaatattgcgacatatggctactgagctgagattgaacatgagaggtgatggttttgttaaagttgaagatttacttaacctgaatttgaaaacttctgcaaatattcagttaaagtcacacacgattgatgaaattagagaggctgtgagaagggacaataagcaacggtttagtctcatcgatgagaatggagagctcttgattcgcgctaaccaaggccattcgatcacgacggttgagtcagagaagttacttaaaccaatactgtcaccagaagnngctccagtgtgtgtacatggaacttataggaagaatttggaatccatcttagcatcgggcttaaagcgtatgaatagaatgcatgttcacttctcttgtggattaccaacagatggtgaagtgattagtggcatgagaagaaatgtaaatgttatcatcttcctcgacatcaagaaagctcttgaagatgggattgcgttctacatatcagacaacaaagtgattttgactgaaggcattgatggtgtattgcctgtcgattacttccagaagatcgagtcttggcctgatcggcaatccatacctttctgattcatataattcaacatcatgcgaagattgacaggatcctatgacaatgattgtgaggattcttctgaaccttgattatgtaatgttgtctcagtgttttcaattgcacatatgacaatttatgaaaactttcaagattatgttgtttcctttgcccaaaga

SEQ ID NO: 226 - DNA, 1007 bp, Arabidopsis thaliana
  misc_feature (1)...(1007): n = A,T,C or G
tatatgatgcgcgctctagaggatgatttcaaacaagttgttggtattagttggtatctttggatctttgtcgtcatctttttgctgctaaatgttaacggatggcacacatatttctggatagcatttattccctttgctttgcttcttgctgtgggaacaaagttggagcatgtgattgcacagttagctcatgaagttgcagagaaacatgtagccattgaaggagacttagtggtgaaaccctcagatgagcatttctggttcagcaaacctcaaattgttctctacttgatccattttatcctcttccagaatgcttttgagattgcgtttttcttttggatttgggttacatacggcttcgactcgtgcattatgggacaggtgagatacattgttccaagattggttatcggggtcttcattcaagtgctttgcagttacagtacactgcctctttacgccatcgtctcacagatgggaagtagcttcaagaaagctatattcnaggagaatgtgcaggttggtcttgttggttgggcacagaaagtgaaacaaaagagagacctaaaagctgcagctagtaatggaaacgaaggaagctctcaggctggtcctggtcctgattctggttctggttctgctcctgctgctggtcctggtgcaggttttgcaggaattcagctcagcagagtaacaagaaacaacgcaggggacacaaacaatgagattacacctgatcataacaactgagcagagatattatcttttccatttagaggatcatcatcagattttagcttcaaggtccggttttgtggtttatacataagttatagtgacttgatttttttgttttgttacaaagttaccatctttggattagaattgggaaattgaatctgtttgtatattgtattatttggaacattgtggatgcccatggatatgtttctgttcaattattttggttttgggtaatgaaatttgaaaccaacgaaaaa

SEQ ID NO: 227 - DNA, 1006 bp, Arabidopsis thaliana
ttttttttttttgcagatgtttttgcttaagttgatctttacaggtcttatcgcaattacatggcttatatcaatgacttatcgagaaggtaaatatgtacaatgagaaagcaccacactatataaaacattagccgtttcaaaacactttcaatatgagacagaaccgagtccttctctgctacattcttcatcaaagaaacttgtcacaatagtttccacatcctgcaatccaactcctacacaaagggtcttggatggtgtcctaactgaatcagtcatcacagcatcagtctccttcacaactctaacgtttgggccatcacgacacttccccatgcacttgcaagccacagcagatccttcgaaacccgtcatcgccctttgaaactcatccaacaacaaagctcctcctgatctcttacacttccctcccatacacacttctactctattcaatggtaatccaaccactgaaaccgcttctaccgtcttcaatgtctgtccaggattggccattgaaggaaaaattgtggatgtttgtagagcaatctgcaatgcttcactggtgttcttgcaagaaattgcatcctcttggatcctaggaagggttgctactgtggcttctggttgtaacggctcaagaaccggtttagccttgtttcttaaagagctcatgtccacaactttgcctttatcacaatcactatcacttgattcagacgaagaagatgattcagagtccatttcagtcatcttcttcatggctttggctttagccttctcttctttcctctgtttcttcaatatcttctcctctgctttcaactgctccagctgcttaaccaatatctctgtagcttccgagattgtcttggtctgaatctcaccaaccaaaccagcttcaggatcaagaccaaaccctatactagagaacatatccaagttcttagaaagacttttaagaactttcgccttcttcttcaacgccttcttctccttctcc

SEQ ID NO: 228 - DNA, 1004 bp, Arabidopsis thaliana
ttttttttttttttttttttttttttttttttgatagaatcaatcaacagagataatatctccgaagaaatttgttatttagagaatgacaagtgacttaacattacgtttccagataccaaaatacctaatcacgaactgttacatcaaatctaaagcagaaccagaacaaaatagagaacacacaaaaccaagtagaagcataacaagcgagagagagaacattcattggtaatcccaaacctaattaaaggaattaccatcctccaccaccaccgcttcctccgtaacctcctccttcaccaccaccgtatcctcctcctccctcacgtcttccaccaccgtagcttccgccaccaccacctcttgaggagtaaccgccgccgccgccgctgtatcctcctccaccctcgcgtctaccgccgccacctccgtagctaccacctccaccggagtaacctccaccaccgccgctgcggtatccaccgccaccacctccacggtggcctccgccgccaccgcttcctcgtgactgagcctcgttaacagtgatgctacggccatcgagatcttgtccgttcattccctcaatcgcatccttcatggctttctcatccttgaaggtgacgaatccgaatccccttgatcttccagtctcacgatcgttaatgatcgatttgggaaaatacaagtaacagtagtagtagtagtagtaacaaagaacgagaatagtaacagagtaatcgaatcaagtaacagagaaacacaagatcggaacagatccgtcgaggatgagatcatcgatatcactcggagtccgatctcggcgtgtaacagaccttggaatcaataacgtcgccgtattgagcgaaggcagtctcaagagctctgtcatcagtggcccatgctagacctccaacgaagcaccgatactcaacatcaccggacgccattgaaatttgaaaagaagatctaagggattacagtgagagtcggacgcgtgg

SEQ ID NO: 229 - DNA, 1003 bp, Arabidopsis thaliana
  misc_feature (1)...(1003): n = A,T,C or G
tttttttttttttttctaagtaaccctttttaaaatttatcctataaataaaatttacagttcatcaatacaacaaaaacaactcatgaacctttggtaaacaagaagaaagaaaccgatgcaaataaagaaaacgaaaatggagtttttaaaaattattaaaacaacaaaagaaaaaaaaaagaagaagagttgttacgaggcgtgaaagatgcgttgcttcttgctacacaccaacgataacatctcagtatcgttcactcttttgtttcctacgacgtcgtttcttgaactctccggtgaaatgttaactccgaacaatctcaaaacccgacccgcatctaaatctgacccggatctcgacttccacccaatgtacaactgttgatcctgaccgttagatctactgaaactaaccacgtcaccagcacgtagattcttctccttaacgaacctgctccaacctttagtcaaaacataactctgactactgttccaatacgagtaacggaacctccacactttcccgttaacgtcctcaaagttcaacaacactcctttcacggaaacgttacttgacggtaacggaaaatgtttctctgcgtgatgtttcggtataaccaaacggtttagcttcccaacgtcgcttggcgttaccgctttctcaaacagtgcctccgccgatttaaactccgtcgtagaaacaccatcattactcaaccccgacgttaacaacgtcctagtcatgtttccgttaccattacgacgccgtttactctgctctaactcttcgttataagtatgtttcctcaacatatcaacgatctcagatttcgaatgagaattcaagaaatcgacctcgtcttcgtccatcttcacgtctttgaaatttgtgacggcgtcacggcgacggaacctgtgaannnnnnnnnnntaggcacgagcggctnnntcttcttcgttgaatgtcccgagccacacgcgctggtgtttctcgtaaatc

SEQ ID NO: 230 - DNA, 1002 bp, Arabidopsis thaliana
  misc_feature (1)...(1002): n = A,T,C or G
ccacgcgtccgactactaaccagcaaatgggtcttaacgttataacagaactgatcatcgggtacttatacccaggaaagccactagccaatgtcgctttcaagacatacggatacatcagtatgtctcaagccttgtactttgtaggagacttcaagcttggtcactacatgaagattcctccaagatcaatgttcatcgtccagcttgttgcaactgtggttgcatcaactgtctgcttcggaacaacctggtggctcattacatccgtcgagaacatatgtaatgtcgatttgctcccggtgggtagtccatggacttgtcctggagatgaagtgttctacaatgcatcaatcatatggggagtgattggtccagggagaatgtttaccaaagaaggtatctatcccgggatgaactggttcttccttatcggtctcctcgctccagttcccttctggtacctatcgaagaagttcccagagaagaaatggctaaaacagatccatgttcccttgatcttctctgcagtaagcgccatgccacaagctaaggctgtgcattactggtcctnnnnnnnnnnnngnnntgtgttcaactactacatcttcaggaggttcaaaacttggtgggcgaggcacaattacatcctctctgcggcgcttgatgcaggtactgcgattatgggagtgttgatattcttcgcattccagaacaatgatataagcttacctgattggtgggggcttgagaattcagaccattgccctctagcgcattgccctctagccaaaggtgttgttgttgaaggttgtcccgtgttttaagaattgaagtagatgcaacgttgtcctgaaaggggtaactgttgatggcttcggtaaccttatatctgtgtaaaaccctccaagttaagggactcaaacaatgtaaagcactagatttggtttcatgttcttcagtatttaactattccctttgtaagtataagaacagtagcca

SEQ ID NO: 231 - DNA, 1002 bp, Arabidopsis thaliana
  misc_feature (1)...(1002): n = A,T,C or G
attattgttttgtaataatcgtgagaagaaactttagggtttcactgtttcagagttttgattggtgaattataaaagatgcagcaatctccacagatgattccgatggttcttccttcatttccgcccaccaataatatcaccaccgaacagatccaaaagtatcttgatgagaacaagaagctgataatggcgatcttggaaaatcagaacctcggtaaacttgcagaatgtgctcagtatcaagctcttctccagaagaatttgatgtatctcgctgcaattgcggatgctcaacctcagccaccagcagctacactaacatcaggagccatgactccccaagcaatggctcctaatccgtcatcaatgcagccaccaccaagctacttcatgcagcaacatcaagctgtgggaatggctcaacaaatacctcctgggattttccctcctagaggtccattgcaatttnntngcccgcatcagtttctggatccgcagcaacagttacatcaacaagctatgcannnncacatggggattagaccaatgggtttgaataataacaacggactgcaacatcaaatgcaccaccatgaaactgctcttnnngcaaacaatgcgggtcctaacgatgctagtggaggaggtaaaccggatgggaccaatatgagccagagtggagctgatgggcaaggtggctcagccgctagacatggcggtggtgatgcaaaaactgaaggaaaatgaaatagaggaagaataagtgatgcttcttgttgatatcaattaggttctacctttcatttttactttcttcacgatgatataaaaaaaaggttttgtcattttatgagttagtctctgttaaaagggttctgagacagttgagtttcagttcctagatggatgtggaatggttcacattcacatgtacaatgttaaatgttgttgtatggtattagtgtcaccggttcaatttggtgtaaaaaaaaaaaaaaa

SEQ ID NO: 232 - DNA, 1002 bp, Arabidopsis thaliana
  misc_feature (1)...(1002): n = A,T,C or G
tttttttacaaagtcagacatatatataaacaactatgtcttttagaaaccctaacaaccagaaagcacaataagtcaataacagaggataatctaaacctaaactaacaaaggtcagggcacaaaatgtcatttattcataatgaaaactctctcctactctgtaacctagatctttcactcaatttctcttaatctcctgtacaggtagcactatcctattacattaatcccaagctaggagtctggttcatccgttcttgttgcttcatccttcaccatggtccggttaatgtccttctcaagcattgccttttgctgccccacggtcgcttcgacgtttctttcagctcattcttctgcatttccaccatttcagcctgttttttctgcagttcttgattcgttttcttgagcttttcaatttcggcttccagttccaatgtataagcctgctttcgagctcttgatctagcagctgattcccgattcttgatcattctcctttgcctcctctcgataaccttctctagacctgtattgcttcttcgtcctcgattaagcacatacggaactggtgataaagaattattttctgcgctgcttgttcctggagaagttgctgcaacagtgaccccggttcctccgtaactagctaatccattattattgttgatagaattatttgcagccccagcaaaacccttgttggttatattcacaggcgcagaaaatgctacgtttgcttgtttaggaaaaatggtttgaggcagccgctgctgtggatgaggctgattcagctgctgcatctgctgttgttgctgctgaagcaactgctgttgttgttgttgctgctgcattgttccacccattttgagccctaaaccaggtggctgattcaagatcatagaatcattagtaccattnnnnnnnntgctgttttgatttggctgaccaaatccaaaacctaaaccgccagcagcagtgctgttaccataaaac

SEQ ID NO: 233 - DNA, 1001 bp, Arabidopsis thaliana
  misc_feature (1)...(1001): n = A,T,C or G
tgcttccattaaagcttgctcgatctcttcttctccacgagactctcaatctcactcataattccggcgatacagacgacgttgatgaagacggagaaaccagtatccggcaaattctaagctcctacaagcaatcaaaaacccgatcgagatccgataacaacaagacgagaaattcgaaaaccccattgctatacttcgttccaacacgagaattgatctcagatacataccgattagcaacaatcgggagagatctaggtatggatatgtacccaacaccatcactctctcacatcatcttctcattcccatcgccagaatcaaaatcgccgtcacctttctcttcttcatcgcatccttcgacatggtcgtcttctgcttcgctatcgtcgtctctctcgtggtctcttcctaacgacgccgtaatgctctccttcccgtctctctctgcctcatcgctctctcatctccgatccttcgtctccctctccaacggtctcttcaaactcgtcttctccgcaaccaccgtagaaacatctnnctcnnnnnnnngatctgttagcaactgggactgctgctccgtttcactcttctcaaaaatcgccaacaagcgaatcggatcgatggagagtttttcgaatgcattggcttcaaaaggatggacaatttacaaaacgaaagagaatccgacgccggaatctactaccaacggagtgagctcagtgtatctgtttaggaaagtgtatactggtcggatcatgacccgagaaggaaacgggtcgtgtagagtaagagagctgagacttcctcaattggatttcaggaacgcacctctacggattctgcaatatttgatgttgatgactgacgatatatttttccttgcgtaaatttgaaactttttttttttgtttgtnntaatctgtttttgatttgtttctttaatgtaatcatctgatttacaaagattggatctctttggcctgtaaaaaaaaaaa

SEQ ID NO: 234 - DNA, 1001 bp, Arabidopsis thaliana
  misc_feature (1)...(1001): n = A,T,C or G
ccacgcgtccgcaaaggaaaatgttgccccgtactaggcgcgtggctctactctgcttactcaaccactgctctaagccgttcgatttccgccgccgcaagaaactcatcctcctcctccgccgcggtaacgactcctgaagaagatatgcctttgcttcccgatgactcggagacttgcgttgacggattagggaaatctctgaggcagagagggattgagctcactagaccgaacgagacttgcgacgtcgtttactgttactgtggaatcagattgcatccgttgagctgttccgaggcttttagagtgaatgatgaagggagactcgttggagacgagagagttgatagattagagactgattgtttgagtggaagccacaacaatgctgatggattctcacctcttcttgnnngcaacnnnnncttgaacantctctataagctaaatccgaagaaaacttcagggacaagaaacccatcaaaggaagaccnaaacagaacagcaaagatgcacaacaaagactgtgtcctcatgggtctcacttggcttctcgctaagaaccgtactgcttatttccccactgtcacttctgtcctccgagccgtcatgctgaaccacgatggcgtgccacgttcatgtgctctcggcagcgacggcatgcctttagccgtcgattcttccgaattctccaacggctcgccaacttcacttcagtatccgcaccacttggtccacttcttactttacagcgttatcacattagtcctaataaggtcgtggtgacgtggcacaccatggttggatttgattgtgacgtggagcacgtggcattacgtggttggttgagagaagtgaaattcagatagagagaaagagagagggctttggttctgtctttgtaaattagttttttggtgtcgttgttgttttagtagccatgttctttaacattttattacatcaaaaaaatcttgttgtattttgtcaaaaaaaaa

SEQ ID NO: 235 - DNA, 999 bp, Arabidopsis thaliana
  misc_feature (1)...(999): n = A,T,C or G
aacaaagctaaaacattaatattgtaatatgaaatgcatagtctgaaacaaccaccaactaactttataagtttacatttaaactttnnnnttttgttacgtttgtttgccactagtaccatcattacttgcatttattctgcactaacggtactaatcgaattggttctgtttctttacttccacaccatttgttttctttaacaattttatacattacatatccataaatggaaaacaaaaaaatatcttcacttcacatgcctccaatgaatcctctcttcatctcttagcataactaattcaatcattgtcatctacaaagtcacacagagagaattgttaaatcgtaaagccacaattataaacataagtgtaaagagcaaaaccggtggtataaaccggacaatagatttgcttcacaaaccccaacaaaacaaaattaggtcactgagatttgactgttacctttaaggaatttcaatctcatcatcgaagcctatccacaataaaaccaatcgtcgaatcaaatcttaattagattgctgtaacgatcaataaatctagaactaatcacatcaacaatctctaacattttaaaacctagatcttaaattcaagagtcctcatactcctacatctacaaatcctaaaatttcgaaacaaaggcaacatcacttggctttaaaatcaagaccaaagcaaagattcaacatttgggcaaacaaaaggagactaaagaacattcaaatataaaaagggataaaaatcagatatacaatattctaaaacaaacaatttcagattcaaagatataaaaaacctttttctaggttatatcaaaaataaaaagcataagaaaacgaatataaagaaggagaagcgtagaaatcttccagatctgataggatttacgagtttttttacacctcgaggatccgattcagttgatgcaaggcgggatccaatccctgctcacaaaccaataaaggtttaaaa

SEQ ID NO: 236 - DNA, 999 bp, Arabidopsis thaliana
ttttttttaggaaaagatactttattattattcatcttaaaatggaaaaacactcagtatcaaagtacaatcgccaaatttttattgtggaagtgagaaacgacgatgaaggaaagccttgaagctttgacagatctaccaaacttaagaaaggccacgaacttttccagtttcagtgtcaatatcaatctcgtagaaacaaggtcttgtaggaagtccaggcattgtactcattgtaccaaccagtggatatatgaaaccagctccaatgcttcctcttacatccctaattggcaatacaaaccctgaaggtgctcctttctttgatgcatcatgtgagaatgagtactgtgttttcgacatgcatatgggaagattcgagaagccttgttgtgtgtacatctcaatctgtttctctgcctggtctgaatattcaacaccactggctccatatgacttagctattgcctcaattttgtctttgataccaatgtccaatgggtagagaaacctgaggggctgtgtaatgttttgacaagctttttcaaccgcgataccaagatccaccgctcctttaccactatgagcatggtgggagcagaccacagcatcaaaagcaccggcatccattgaaaatttcctaactgcatttagttctgcttcggtatctgttgcgaacatattcacagcaacaattacattcacaccgtaggcctttgtgtttgagatgtgctttgccagattcacacagccagcttcaactaaggaaacattctcgcttacataagcacgatcaagaggtctcccggcaacaacatcaggcccacctccatgcattttcaaagccctaacagtcgccacaacaattgcacactgaggcgttagcccactgtaacggcacttaatattcatgaacttctctgttccaatatcagaaccaaaacccgcttcagttaccacaaatccaccaggtcccaccagcttcaaagcgattttatc

SEQ ID NO: 237 - DNA, 999 bp, Arabidopsis thaliana
  misc_feature (1)...(999): n = A,T,C or G
tttttttttttttttttttcccaccaaaatttaatatgtttaacaaaaattanaaaacattcatattgtgcccccagccaaaaaaaaaaaactactcatatactattagttataaaatgagatgaaatgtgttttttttctttctttttaatagttcacaagcaacacatgcatctatgagaagatcaatatacaaattacaacttttttttgtataatctcgtctctttcaatttaaattgtgaaatctttctttaacaagcagagccagcttctaccagcttgcttaatttgttgttccttaatctttcttcgtaaacttcacttccgtgcatctcattctcatacctcggtggcataggaatcaaaggagacaaactctccactagcttgagagcttcttcttctgtgttgacgatttggttgaagcagaagtatcgaccgcaagctgaaacatcctcgaatgctctaatatgaacgtccgctagaaacttaacgtctacataagctaacacaccattctcatacatttgtgcagctcctttaaggtatgacatggtgggcctagcgttgtgttgtgcgacagatggtccgacgacaagaccagggttgatagagaccatgttgagcctacggtccatggctaatgcccaagctgctttctccgacaacatctttgccagtgcatgccacaacttcttgctgcgacagaagtcttggtcactccaacacttctcatcaacatccttttgagttccaatgttgtctctccaaattgaagctgttaatgaagaagaaaacacaatcttctctatactctctgttcttccacacgcttccaccacattgatcgctcctctcacttccaaatccacctccttctcccttcagggctgtctaagcaacagaagacaacgttacatgtcttgagagagacaagtatgctttgataatccaacacatctacatcgtacaccactaatctctccggacgcgtgg

SEQ ID NO: 238 - DNA, 998 bp, Arabidopsis thaliana
aagaaacccaacctttgaggaaagtccgtattattgtgaatgatccttatgctactgatgattcctctagtgatgaggaagagcttaaggttcctaagccaaggaaaatgaaacgtatcgttcgtgagattaactttccttctatggaagtttctgaacagccttctgagagttcttctcaggacagtactaaaactgatggcaagatagctgtgtcagcttctcctgctgttcctaggaagaagcctgttggtgttaggcaaaggaaatgggggaaatgggctgctgagattagagatcctattaagaaaactaggacttggttgggtacttttgatactcttgaagaagctgctaaagcttatgatgctaagaagcttgagtttgatgctattgttgctggaaatgtgtccactactaaacgtgatgtttcttcatctgagactagccaatgctctcgttcttcacctgttgttcctgttgagcaagatgacacttctgcatcagctctcacttgtgtcaacaaccctgatgacgtctcgaccgttgctccaactgctccaactccaaatgttcctgctggtggaaacaaggaaacgttgttcgatttcgactttactaatctacagatccctgattttggtttcttggcagaggagcaacaagacctagacttcgattgtttcctcgcggatgatcagtttgatgatttcggcttgcttgatgacattcaaggattcgaagataacggtccaagtgcgttaccagatttcgactttgcggatgttgaagatcttcagctagctgactctagtttcggtttccttgatcaacttgctcctatcaacatctcttgcccattaaaaagttttgcagcttcataggatcttgcttagtaatgttaagtgagaagagtgttttgttttttcgtttatgctttagtaatttaagacatacaaaagtgtgtgttccggattgtagtaagatcttaagacata

SEQ ID NO: 239 - DNA, 997 bp, Arabidopsis thaliana
ccgccctttttttttttttttttgaaaaatcgactaatttcctagaaagaggaccaacatagaacaacgaaacggccccaaaatcagaaacaatcgtatgaagacaaaagtagtgtgcgtatacataagtcgaaagaccatgtcagaatcgggcacatccggttcttattccgcttcatcagtgagatttctggataccaatgaggcgggcataatccacccataataaggaacccaagaatgtgttgcctgttctaactgcaaagcacaacgcactgagtgcaagtttgtgttggtgtagcattggctccaggagacgttgttcaatcacaccagccactatttggtaccttaggttgctagaaactgccatgtagacaccatatgcaacacttgtggagactatcggaacagtttcgacttcaccttcagaattctggtccacagcttttcgtgcttttatgaatgcatttgtaatagcagtaccaaccagcgatgatgtggtgccaacggcaaacagcttagctccattgcgcgttatagcacctagcctttgcaagagagtatatgaggttccggagagagcaacctggaaggcattgtctgggcagttgtggaaaaacttggatatacctccagcagtaagtgcgagaggtggtcgaagagaaacggtaggagcaggaagataaaccaacatgaaatcagcaataatagccatcgccacatcggcaaagacaacttcaagttcattgaagaagttttctctacgccgttcatactcagcagcagtcttggtgaagattccaacaccacattccatggcgagtttagccatgaagagatcatcagccaacaatctttccctaaacccaccaaactgcatcagccaccgcatcacagccgatttctgaagctccaggaaccgagtgataaccgatccaggaatccgacccgcctcaatagcagccgctagatctttgggaagactccggacgcg

SEQ ID NO: 240 - DNA, 997 bp, Arabidopsis thaliana
gagacaaagtaacaaagagaaagagagagaaatatggaagagacaaaatcgagattcaagaggatctgtgtcttctgtggaagcagttccggcaaaaaaccttcataccaagaagctgccattcaattgggtaacgagttggtggagagaaggattgatttggtatacggaggtggtagcgtggggcttatgggtctcgtctctcaagctgttcatcatggtggtcgccatgttctaggggtcattccaaaaaccttgatgccaagagagataaccggtgagaccatcggagaagttaaagccgtggccgatatgcatcaaaggaaagctgaaatggctcgccaagccgacgcattcattgcccttcctggtgggtatggtacgttagaagaattgctggaagtcattacatgggctcaactcggtatccaccgtaagccggtgggtcttcttaacgtggatggttactacaactcgctgttaacgtttattgataaggctgtggacgaaggatttatatccccaatggctcgtcgaatcatcgtctcagctccaaacgctaaagagttggttcgacaactcgaggaatatgaaccggagtttgatgagataacatcaaaattggtttgggatgaagtggaccggataagttatgtaccgggttcggaggtagctaccgctacgtaaggatgtattatggggagtttattttttggtaaaagcagtgtacagcggaaattaagttgtttaacatcagaaggtaagggcggaaagaagacaaaagaaagtattggggtcgttttgataaacattattttgtaggggtggtttaaatgtgtgaagtggataaaccatgtgggtaactgctaaccgcgtatataccaaaccctatcactccccacttgtctttgtacattttggtttaatggaaaaaaaggatagggctattttcaagaaatgacaaaacgatccttttcttttggttaaaaaaaaaaaa

SEQ ID NO: 241 - DNA, 996 bp, Arabidopsis thaliana
tttttttttttttttttttttttttttttttttttttttgcaacacaaaacttaagagaacaaaagcaatatttttttcaccgacaaaaacaataagcaatacacgcaaaagtttaacaaatccagaaccgatatagggtttcaataacaaaaacgaacacacatgaacgaaacaataaaagagatattacgaagaaaaaaattcaggataaggggaaagaagaaagtgaatgctgcttgcttacacagcttacgaatccgagggagccattgacaacatcttaagtctcgtactcctcttcttcctcctcgtactcttcctctccggctgtagcatcttggtactgctggtactctgcgacaagatcattcatgttactctctgcttcagtgaactccatctcgtccatgccttctcctgtgtaccaatgaaggaaagcctttctcctgaacatagctgtgaactgttcgctcacacgcctaaacatctcctggattgaggttgagttaccaatgaaagtagacgccattttcaaaccctttggtgcaatatcacagacactggacttgacgttgtttgggatccattccacaaagtaggatgagttcttgttctgaatgttcatcatctgctcgtcaacctctttggtgctcagctttccacggaacacagcggatgcagtcaagtaacgtccatgacgagggtcagcagcacacatcatgttctttgcatcccacatctgctgggtcagttcaggaacactcaaggcactgtattgctgtgatcctctcgatgtcaatggtgcgaaaccaaccatgaagaagtgaagccttgggaatgggataaggttcacagcgagtttcctaaggtcagagttaagctgaccagggaaacgaagacagcaagtaacaccactcattgtagcagagatgagatggttaagatcaccaaaggtaggattagcgagcttgagggtacggaaacagatatcgtag

SEQ ID NO: 242 - DNA, 995 bp, Arabidopsis thaliana
  misc_feature (1)...(995): n = A,T,C or G
ttttttttttttttttgaagatgcaaacaatcaaaatactgaaatggtggtcctttcttctctatcacaccccggagatcacaaacgaacgaacaagaagctaggtaatatttacaattgtatgtatatctatatgatcgcacaagggcaaaacgaacataaccaatacgacaaaactaagtggaaatgtggagacccaacacttaaagtgtgtgnggaagaaacaaaatagatgtatgctaattatgtagtagactaaccaaacaaagcgccacaccttcaaactttcaagccaggggatagtaatgatgctagttcaagcgatcatcaaacacaacttccttatcacatattgggcatctatcgcttctttcaatccactccagaagacaagagaggtgaaattcgtgctcacactttgtcgttagtcttggattctcaacatcataatcttcaaagcaaataggacaacattcctcctcttcatcaaccaatatcttcaatccttgatgtttcgagaaatctgatttcctcggtgaaagaatgactgagcngnntagagttttacagtctgattccccaagatcttcacatgtcgctagcgtttcaaaactgcttccactcatccttcctttgatggactcagaatctgtgcattgtggtcgccccaaaagcaaatcatatggaagaggagcaggagcacaaaaggtgtcaggtatagatgtctccaaacctatatcaaccaagaggcctgtggtgaatgctgatcccacaccagcacgggttcctgaagggacaagctcttcaaaagattctggacaataatagtaaacaggtgttccaacaagatgtgacttcctcgaagaactacagcaacctcccattttcaccagctatagtaataattaagcaagagtagcgaacaacagtccttgaagcattttactgatgcattgccactgagatgtcgccggagaatttgatgttgtcgtgat

SEQ ID NO: 243 - DNA, 995 bp, Arabidopsis thaliana
ctttttttttttttttttacggtaaatcggtccatgattcaataactgactgtcaccggtaagagaaaaaaagaagccgagttcatataaataaatagacttaacaacatcaacgatcactcctttattgagagaccaactaacataaaacgtaaagtgcaatgactgactcatggaagttggatgagagatagatccatctatttagtttaccaacctggattcataatgcatcaaaggagctcaagaactagagcagaagcacctcctcctccgttgcacactcctcccacaccgtactttccgtttctcttctttagtatcccaagcaacgtgattagaatacgggcgccactgcagcctagagggtgtcctaaggagacagctcctccatttacgttcactttctctggagcaatcccgagtagcttttgatttgcaagtgctacaactgcaaatgcttcattgatctcatagtaatcaacttgagaagattccaaaccagcatgtgcaatggcttttggtatagcaagagcaggagcagtagtgaaaaactctggttcctgagctgcgtcaccataccctttaatttttgctaatactagaagtcctagctgaagagccttctctccgctcactaggacaagggcagctgcaccatcacttatgctagacgcatttccagctgtaacagtccctccattctctttgaaactaggacggagtttcctcaattttgcagcatcaaacttcccaagaccttcgtccttgtcaacaatggttgatggcctacctcttcctccagaaacttcaaccgggacgatttcccatgtgaaggcgccagcttcctgggcagcaataccacgctcaaaactctgaactgcatagtcatcttgctgctcccttgtaatctgaaacttctcagcgcataattctgcacagcttcccatcccacagtcgttatagacatcccatagtccatccttcaacattcc

SEQ ID NO: 244 - DNA, 995 bp, Arabidopsis thaliana
tttttttttttttttttttttttttttttttttttttttttttttttgataacaaaaacaaacatcatatctttcataaagagatcagagtttttggttttattctcttgctaagtaagcgcaagaagagaagcagcacaaggccttagttttgacaagttaaacaacgaaacaacacaaaacatcaaacacaacaacaacaacaataacaacgaggactgcatatttacactgatctggaagcttttcagattcagcagcacaagaccagacgacacaacagggaactcttttctttccattattcaagatctagtaacctccctgaatatacgcatttaggcgttgaagctcctctctatgctcatgaaccactgcacggacaacatctcctatggacaccattccaatcatgcccttgtctttgattaccggaatatgcctgattcggttatctgtcatcagttgcatagcacgcaagaccttggtctccggtgtcacagtgataagcttattctcttcagtcataatgtctccaacttttgttgatttggatgatctcccttgcacaatgatcttccgtagataatctctctctgtaatgataccagcaagagcttgttgctcaccaggtttcacaaccaccaaggcaccaacattgtgttgtgtcatggatttaacagcatcataaacagtgtcatcagtagtacaccaaagccaagatccatcagcacttttgcctttggatttcatgacatcggaaatagttgtgctctcgaatccagattcctccatacgtgcaggttgagttgattcatagcgtgaacaaaacacagaaggctgaatcgccgggttaatcacacggagatgttgcagcacagagcctttcacaacatttccaccggagacgaaggatcgaatcacaccttgcatctttcaactgagattagagaagaagaagagatcgtagtggagcttgaggttgagcttgaaaa

SEQ ID NO: 245 - DNA, 994 bp, Arabidopsis thaliana
  misc_feature (1)...(994): n = A,T,C or G
ttatataatatatatactttcaccacatcatatatgcatctaagtaaaagtgggtacatgcagagggcacatatatttacataaaatccgttttttagttatagatttcagtagcttccaatatacttgttggtcccttcactgggactggtcctggttgtcagagacggcctcatagtgactatagtgttttcgtctgctcctgcttccagtgcagccatccctgcttccagaaacttctgaacagcgtcttctgcgtatttgttgccttcacttactgtcatgttcttcccaatgtctggatatgagtttaggagatggtctccaacgagttgagaggccagttggatcagctccacctggaattctgagagctttgagtcttcttttgctccccatggcctcagcgatagtttcacttccggcagtttctctggacaatcttggnnaggagaatctcggatacggaagtatttctcaaatgtannagcccatgcatctctctttgtaaggaagtgagactttaggttgaagagtttcttcaccgttgcagggatagaagaatgctcaaattgtgaatgtggtgttggaccttcaggttcatgtatcacagtgcccttctcaatccagggggagatcagaaaggtagggacccgaacacccaatcggtcaaacccaaagtaaaacggatcaggtccaatgataccatcagggttaggcacacctttaaccggcgtgggaacatggtcataaaacccaccgtgctcatcataagtaatgagcaaagccatctctttccactgtggactactccgtaacgtctcataaacttccttaacaaaccgttgacccgccgccacgtcatgcgacggatgatcatcattagccggaaaaagatcgatatcgaaatatctctgttccacgacagaataattcggaagcttcccaagcttagcgtcgagcttgaacttaagtgcatagctatggaatttca

SEQ ID NO: 246 - DNA, 994 bp, Arabidopsis thaliana
ccacgcgtccgatagaactcaatggcgacacacgacttcgatttcactgatccctatggaaataaagatagaaaaagtttgtactcaaaccaagataactatttcaataattggtcttcacttactcaatcagaggaagttgttgaggagctttctattcaacagactaaatacgaccatcggagtctgccttctttgagaactgccgaagccgaggctgctgagtggaatgagttggagagatgggggaaccaagagttgcagcataatggcactcgcattagaggaattataacttacaaatcagggaacttgcccggtgttttgtcattctctgtaatagagattctcatgatggttgtggcttcgtttgttccaaacttcttgactggtcttttcactggagctggccttattggaatcatcatgacgtcttctggattctcccgtcttcttcctgatcttcccaaaatcttttgccgtttctcgatttcctacacgatttcttacatgatttttggatcttgggccatcaagctagggcacaacaacaattttctcgggcctctatcaccggacgagccgaaaatgacaggagaagaaatgaatatgaatgaatttggagtaaaggtgacgcattcaggatggtggggcttccctgagattgtgatagcaatccttgtgtgtacctggcttcttttcttcgtggcccaaaagctgaaggagagagcacgaccagcttcaagggtgattcaggcgaaagtttattttaatgtgcagctttcataatatcagcattatcatctatgagatctggttatctatttaagatcagcattgtcattgttggaataagttttctttaccaaactctaaacccaaatgttccactattgaaacttttttttgtttttcctcctgttttttagcaacaaaatgtagggatatctgtttttttcttgtgatgactgtgaataaagaagaaaagagattt

SEQ ID NO: 247 - DNA, 994 bp, Arabidopsis thaliana
gactgatccatcaatatcataaagcttcttaaatatttcacacacatacaaagtaatttacaagatatgaaatctgcatcacatttccaagatgcaacaaaccggatacacacaactcgatcacaaattaaactcactttccggggacgaagttggtagcgaaggcccatgcattgttgttgactggatcagccaagtggtccgcgaggttctccaacggtccctttccggtgacaatggcctgaacgaagaatccaaacatagagaacatagccaaccttccgttcttgagctccttcaccttcaactccgcgaaagcctcggggtcagtagcgaggcccaatgggtcgaagctcccacctgggtaaagcaagtcctctgcttctcccaatggaccatctccggcgactctgtagccctcaacagctcccatgaggataacttgagtagcccaaatggctaagatgctctgagcgtggaccaagctcgggttgcccaagtagtccaatcctccgtcgctgaagatctgtgaaccagccttgaaccaaaccgcttctccgaacttcactccgttcctagccaatagctcagggaaaacgcagcctagggctccgagcatggcccatctgctgtggataacttctagctcacggttcctagcgaaggtctcgggatcggcggatagaccggcagtgtcccacccgtaatcaccggggaactctccagtgaggtagctcggaggctcaccggagaatggacccaagtacttgactcggtcggatccgtaccatgggctgccggatggaccggtgggcttggaggctttgcgcatggtgattcggccggttccaaatacttcggaggccgccggggatagcttaacggcctttccggtcaaagcaggagaggagagagccattgtcgaggcggccattgcggtgagagtgtggcgcaagtaaaaggctctttagttaataagagttctagatcgcga

SEQ ID NO: 248 - DNA, 994 bp, Arabidopsis thaliana
  misc_feature (1)...(994): n = A,T,C or G
ataattattacatcaccatttataatccatttacaacgaaacaacacacttcagaccaaaaaaaaaaaacacaaaaacacaagcatatgtgacaacacgaactacattcatgattcatgcatggtcatcatcaccatcattatttattattattaccatcaacatcatcaaggtaacatatccatagacatcatattgacatggtcacgtgggattcatcgattatgagtttcactcatccaaaatagttatcaatttcgtcaaacaagtcttgacgttcatagaccgnnntcacatcaacgacgtcgttttcatcctcgtgaagaaacctcgtaagttctttcatgaacgcannnnnnncaacacaagactcctccaacatcatgaaatcttcatcattcagaaatgtggagaacccgatagtatcctcatcatcaacgttgttattaccaacgaaattatcgcagtacattagaggattgttaacggaggaatcagagaacgtggacgaagaacacgtcagattaacgttaccatcaacgtcaaagttcgatgaaactggtgttgttgcaacggtcccatggcagagaagattcgaggttggtgcgaannnagaactcgttgacttaactgattcagagtcaacggaaacacttgtagttgtagtattagtagtgtgactagtagaagcaagtgggcctccacttccgataatctcagacagaacactctgattgattctctttccgaacctattagctactttgttcaagaaactagccgatgataatccaaaattcttgttgttcttcttcgccttgtcattatcaagatcatggtcactagttgtcagattaacattttgtttctccgggaggttttctgatttgtcggtaccggaggttatgcccttgtgtgtaactggatcaatacctttcttgatcaaacgttttttgatatgagtgttccagtagttcttgatctcgttatcggt

SEQ ID NO: 249 - DNA, 993 bp, Arabidopsis thaliana
ccacgcgtccgctcttcttcaatcggaaaaacttcttcgctctatagatcctcgattccttcgttttctcgcttatcagtgcgatcaatggcggattcagctttcaggaaaattcagatccaaagagatgacactacatttgatgcctatgtggtcggtaaagatgatgcgcctgggattgtggtgattcaagaatggtggggtgttgactttgagatcaagaaccatgctattaaaatctcacaacttgagcctggattcaaagcccttatacctgacttgtatcgaggaaaggttggtttggatactgcagaggcacagcatctaatggatggccttgattggccaggtgctatcaaagatatccgcgcttctgttaattggctaaaatccaatggctcaaaaaaggttggtgccactggaatgtgcatgggaggtgcattagctatagctagctctgtattggttcctgaggtggatgctgttgttggattctatggaaccccttcctcagagctcgcagatccagcacaagctaaggcacctattcaggctcattttggagagctcgacaattttgttggtttttctgatgtcacggcagcaaagaatctcgaagagaagctgaaagcgtctggagtagcacatgaagttcacatctatccaggtaatggacacgcgttcttgaacaggagtccagaaggagtgagcagaaggaaaagcatgggactttctgatgaagatgaagccgcagtggagcttgcttggtctcgcttcacctcctggatgaaacagtacttggcttaagctttcttccatcaggcagcaatggttgatgtaagtcccaaaacgttgtgtgatgcccaatcatctttaaataaggacattgctcttagaacttttaatctgaaccaaataaagaggtttgttcacttgtgaatcagtattgagtggaaatgttcgaagccttttttgtaaaaaaaaaaaaaaaaa

SEQ ID NO: 250 - DNA, 992 bp, Arabidopsis thaliana
  misc_feature (1)...(992): n = A,T,C or G
aaacatctctgagatccctaaacaatgtaatggtaaactaactcacctggctaaagaatacaacagatggaaagttaataacttaaaatcagatcataaattcagtatctgaacaaaagtgagtgaagacttgttgttgtaacaaagccttcatccatatcgccttttctttgacgctggtttggtttggtgccaaattctaaaacgccatccgcccagcaagcctactctctgagattcgtctgtctatcgctgcatttatcgagttcatctggctggtttcatcgtgcactttgtattttggtaaggacattcttctttcctccatagacatcgcttcatcatcccatacaagatagacctcattaggctgattgctaggagctttgtttgcaattacaggaggtggaccaattgaaggacngctagtgtttgggccannggcataagaatgagcattagtcccacctggaatagaattgttaggcggataagcatctgctgatcctaaagcatctgcatgagatggttgctgagccccaccaacaggcagaggagcagaaaatggtggagcttgagaaggaatgctgttattcacaacagggaacagaggttgaggaactggcattgcaggtgatgatgtaggaattccaggaggagttactccagtgactggtgatggttgtatggcaggagctgaggttggagttggagtcatccccatattttgaacaggaaaaagtggttgtggtcgataccctaaatgggcagctggaggtacagaaagagctggattttgaggataccattgttgcggacgaggaggtggcatttgccatacaggagcaggatgacgcataggaggacccggataatacattggtcgtgcaggtacagcaccaggtacttgttgaggcggatataccattccatatggtctaggaactacaccaccaagaggggcagaaggaatctcaacttttgcaactttg

SEQ ID NO: 251 - DNA, 992 bp, Arabidopsis thaliana
  misc_feature (1)...(992): n = A,T,C or G
taaaaatggtacaaggacgtgatgcttcaggtgaaacaatgtctttattttaatccgaactgtacttagatacacactcataaacacacaacaaaacattactagagaaggcagagacaaagcagagcacactgaatcaacacaatcacgaaattgaagcttgagctgagcgttgatgcatagttatcaggaccagcagaatctggacaagctggggaagctgtggtgaagatggtttggttggagtaaccagcatagacgcaatcacgaggttgtctgcaagaggcgttaagcaaagctccatcacattgtgaaaatggtgggcaggtttgccngttcgaaggcttaatctcagatgatgattgacagcttaaagtccaattcttcaaagcgtcacaagtacacttgacgcaattgtttgcagtgaagacgtatgagttgttagacagaagcagaggagcatccaacgagtccttcctcacagaagagctacaagctttgagagggacgtcgagaggtttatcagcaagaagctgagagtcaccaatgattccattgagctgagccaacgtcgtgttgtccgttccaaactgagcagcgatctcaccgagagagctccctagtttgactacatgtgcgtagtgaacaacatcctcaccgttcaatttatcacagctacaaggcaaagggatccaaaacttttgaccggtttcgattttgttcgggtcagggattttgttannctcactgatcnnnnngtacgtnnngagaccaccgaaaatctcagttgcgacgaaagagagtatgtcgtctttcttgatggtgtattcgatgtcccggttcgagacaccggttccattggagcaagagcaatggattgggacacgtacgacttgattcgggttcacgcgttggtcacgtgaggtgttgagtgggagattgttagctccgaggatcgagcggaggttcttgacggcaaaaaggcggacgcg

SEQ ID NO: 252 - DNA, 991 bp, Arabidopsis thaliana
  misc_feature (1)...(991): n = A,T,C or G
ggtagtgttaatgacggttcgaggctcaagattggtatcgtcgggtttggaaattttggacagtttctaggtaaaaccatggtcaagcagggtcacactgtgttagcttattccagaagtgactacactgatgaagcagcaaagctcggtgtttcgtatttttcagatcttgatgatctatttgaagagcatnntgaagttattattctctgtacgtcaatcctttcgactgaaaaagttctcgagtcactaccgtttcagagactgaagagaagcacactttttgtggatgtactctcagtaaaagagttcccgaggaatttatttcttcaaactctcccacaagattttgatattttgtgcacgcatcctatgtttgggccagagagtggatgtcgtatggtggagatgtcgtgtgctgaacatgattggcatgctgctggatcacagtttatcacacacacagtggnaaggcttctggagaagctgagcttggaatctactcctatagataccaaaggttatgagacattgctaaaactggtggagaatactgctggtgacagctttgatctgtactatggactatnnntatacaatcctaatgcaatggaacagcttgagaggtttcatgtggcttttgaatcattgaagacacagctctttggacgactacattctcaacattctcatgagctagctaaatcatcttccccaaagacaactaagctattaactagctaaagttaatattctctcagtcatgctccttgactactaattatactgttctactcaatactcaatatggtggaaatcgtttggtctttgaaaggctttgatgtaagtttctttctttctttgtagctttatttgacccttttgtgggtttgttgtgtcttttgtcctcgatacgggcttcacagtcccaaccagtttgaatgttaaacagaaataaagtgcagacaagattttgagtttggaaattgtt

SEQ ID NO: 253 - DNA, 991 bp, Arabidopsis thaliana
  misc_feature (1)...(991): n = A,T,C or G
agaagatcaaaaccatgacgagtcaccacgcgatcgaagtgacgaagacggtgctggaagtagccgacgtagcatggaccgcggtggaaacttaccatcaccaccaccaccaccaagacgaaaatcacgagtcaacgaatccaatttctgatccacgagatcgtgaattagaagctcttcgtcaagagaatcgtcgtctcaggactttgcttgaatcgaatcttaaactctttgagactctcgctgaatctgctgcgttctctcatgattgccctagcgacctctatgctaggcttgtaacgatggttacttcaagagatttcttggctagattagagaatctaagacaagctttatctaatggaactcagaatcaatttccattcaaggaaccaacagaagatgatgtgaagactgttgaagttcttatagagatggatcatcaagagccaagttggtgggttttagttactgatgatatggttcctagtaatgtcgaggaacaaagcgcgatcgataacgaacattacattgttgtgaatgaagaacatgtgattgatgctgttgctcactttttggctaaatgtattatgtcaaatcccaaagctaagaatctcaaacctgaagagcttcagaaacttttggtgcaagaagttactgctctgagcaaggtagggaaggtagtggatatatggcatgctgggaaaatgttctacacactgtccacttggggacttgcatttggagggttataccaagctcgtggtgtgctgaagatagctgctaagggtgttcatgcgaccagcaaggttgttcttagggctctttgaaagttataagaggtctatctaatgcgatgaaagtgggaatgatgatcttcaactatctttgggtttgtctttctgtgcgagactctgttttnnnnntaatagcattgcgtgtgtaaatagtgtaaatagggtttgatcaatgttgtatttcatattgattt

SEQ ID NO: 254 - DNA, 991 bp, Arabidopsis thaliana
  misc_feature (1)...(991): n = A,T,C or G
tttcggtgcacctgcttcagccacttcaaacttgaactgagaaggatgggaaacgaatcatatgaagacgccatcgaagctctcaagaagcttctcattgagaaggatgatctgaaggatgtagctgcggccaaggtgaagaagatcacggcggannntcaggcagcctcgtcatcggacagcaaatcttttgatcccgtcgaacgaattaagganggcttcgtcaccttcaagaaggagaaatacgagaccaatcctgctttgtatggtgagctcgccaaaggtcaaagcccaaagtacatggtgtttgcttgttcggactcacgagtgtgcccatcacacgtactagacttccatcctggagatgccttcgtggttcgtaatatcgccaatatggttcctccttttgacaaggtcaaatatgcaggagttggagccgccattgaatacgctgtcttgcaccttaaggtggaaaacattgtggtgatagggcacagtgcatgtggtggcatcaaggggcttatgtcatttcctcttgacggaaacaactctactgacttcatagaggattgggtcaaaatctgtttaccagcaaagtcaaaagttttggcagaaagtgaaagttcagcatttgaagaccaatgtggccgatgcgaaagggaggcagtgaatgtgtcactagcaaacctattgacatatccatttgtgagagaaggagttgtgaaaggaacacttgctttgaagggaggctactatgactttgttaatggctcctttgagctttgggagctccagtttggaatttcccccgttcattctatatgaactaacacatcaccatcaccatcgctaccaccaccatcacaaacatcatcatcgtcgtcatcatcatgatcagcatcttcatatataaatgttttactcttatttaattgctacttgtaatggtatacatttacttgcgatgagcttcttttccttcattaaaaaa

SEQ ID NO: 255 - DNA, 991 bp, Arabidopsis thaliana
cctagtgttaaaccagagtaaagcttgaaactttggactaaaagaatggcgtctttgggtgtgtcggaaatgcttggtactccccttaacttcagggcagtttcaagatcgtctgctccgttggcatcaagcccatccacgttcaagactgttgctctcttctctaagaaaaagccagctcctgctaagtccaaggctgtctctgagactagcgatgagctcgccaagtggtatggtcctgacaggagaattttcttgcctgatggtcttttggatagatcagagatcccagagtacttaaacggtgaagttgctggagattatggttatgacccatttggtcttggaaagaagcctgagaactttgctaaataccaagcttttgaattgatccatgcgagatgggctatgttaggagcagctggtttcatcattcctgaagctttaaacaaatatggcgctaactgtggccctgaagctgtctggtttaagactggtgctttgcttcttgatggaaacacattgaactactttggcaagaacatccctatcaaccttgttctcgccgtagttgctgaggttgttctcctcggtggagccgagtactacagaatcaccaacggattggatttcgaggacaagctacacccaggaggtccatttgatcctctaggccttgctaaggaccctgagcaaggagctcttctcaaagtcaaagagatcaagaacgggagattagccatgtttgcgatgctcggtttctttatccaagcgtatgttaccggagaaggtcctgttgagaaccttgcaaagcatctcagtgatccttttggaaacaacttgcttaccgtcatcgctggaactgccgagagagctcccactctctaagccatttctactttttttaagagcttccaaaatgtacactttgttcgattggaactccttttgacaatgttaaaaaaacttccatctgaaaaaaaaaaaaaaa

SEQ ID NO: 256 - DNA, 990 bp, Arabidopsis thaliana
tttttttttttttaattgtgaagctcttatctaattatattaaaatcaacaagtaacatttttattgtattcaaatactgatattaacatatgtgtatatatttacataaataaaaattagttctattcatcagaatcggataactcgaggggacaagagccatcatcaacattagcatatgggttgaaatgttctgaatttgtatccatgcatccaggaactagatccaagttgcatctatctcctccttcgaccgtcaagttggcgatcatcgtgcaacgagttggaacaacgttcgagtcaggaaatattgctctttcgcaggctccatcttggctcaactcgttcgctagaccctcattgaagaactcaataggtttgttttgccatcgcttggggacttgaaactgaagtctgtatggaccgtcccaatcgacaccattagtgaatgagaatatcaaattcacagcatgcttaggaatgcaaatctgcatagtgtatatcggagaatcggctttgcctcgatctttcttaagcattgctcttggctccccaccacacatgattggttggttaaatcctccgttgaaagcaaccccatagtcttcgttaagagtgagtttgcttgcagctggattatagaaaagtttcaacttttcacctgaggttggtggaagaccattcatggttttccagtacacaggagcagtacccatctcgaacatggcccatgaaggaagcttgtatctatcaaaataatcaatcatgaactatgtttattattatattcatatagttatatcgaccaaagcaacacgatgaactaaaataaagacagactctttgatctcttcgagaggtgcaagagtcgtggcaacagctttaacttggagatcaagtttcttcctcggaaatctccttagtattggaccaatccttgaactgtacaaaaaactacgtttcgaggataaaggctgcgacggagaggc

SEQ ID NO: 257 - DNA, 990 bp, Arabidopsis thaliana
ctttttttttttttttttaaaagacaaagaagataacattaagattcactgtctctgttcttgtttacacttccagaaacagagtcagtgacgtttgatacaatggaagattaagatttcaacggtggatacataaagtaaactgtaatccaaccgtaattattttggattctagaaaaaaagagattattaaaaagggtagataaaaaagagagattcgaagttttgttttctttcactgactcacttaaccggtgttttgcaatcctgcagcaatacccttcatggttaagataagtgtgtcctcaagtccaggcgcgtattcactcgtggggttaagcttgacgagctcttgtgctgatttgcttgattgcatgatctctttagaaatgtgtggtcgcagagtcacattgtagtttgcatcacggatcctcttcaatgtgtaggcttggcaaacgttgagggtcgtaatgtaagagtcacgtagccttagtctctgtttcaagtaaggatctccttcaagaaggtctttatgtccagcagtctggaggacgaggttcttggtttcatcaaagttggctctgagtttctctccaaaagcccataaatcttctgagacaagaagtttgtcgtacaaagcagcgatcccggggtctcccttggcgaacaccatttcaattagatcgatggtgactcggaaaaagggccattgtttatacatatcttgcagcatgtgaaggtttctcacatccttcttgatcgcatacctaaatgctgctccgaaacctaaccatacaggaagatggaatcttgtttgcgtccaagcaaagatccatgggattgcacggagagattcgatcccaccgcttggttttcgctttgaaggtctacttccaatattcatacgtccatactccagctccggagtagcgaggcggaaatactcgacgaatcgaggttcttggaaaacgacagatcgcggacgcgtgg

SEQ ID NO: 258 - DNA, 989 bp, Arabidopsis thaliana
  misc_feature (1)...(989): n = A,T,C or G
cttttttttttttttttactgccaaagggttgtctgattaaaatgaatccgggaatccgtttttacattcctaaaatgatgagaagaataccaaatcgaatttccgacagaaccaacgcagcactaaggtgacaaaacgagatatataacttactccctttcagcttccatgggcacaccacactctgcaagttttgatgattggttgggttgattcaggaggaagtacattgtcgtcgctggttggtttctcaggggatctcctctctggtaagtcgcactggtttgttttgtagatacacaatctctctgtctgctacatttatgagatgctgctctgatccttcttcatctgacacagaagatgcctctgagtttgattcatcctcatcggagaattcaaggcgttcgggaagagcactaacagctgtaagctgaatgctttctggcagaagacaattacagaaggaacctactcgggccagccgattaatccatcctggaataggctttcctgttagctgcaagcatacttcttcagtgaaatggttacagttcttggcaatcaaatggtaagtgtcaccatggtactttcttgaaagcttctccatgtatgagcggaaatctgaacgggacatgctggtagttcccagtaaaaccgaccgtctaaagatgaaccctggacagttcctaggttccacctcatataccccacttgttggatactcgtgagctccatagcaatattccaaattatgagcctcaataccagaatggaaaatgccaatcccaaaccaataaaggtaattgttgacaggcgttagatcatagacattgagataaaccggcgtaagcgcggcttctccactgctctcatccctctcatcacttgaacatgagcttgagctcaatgtaggcacccacatttnnncacaatatcccaattcaaagtcacgatcgaaccattcctttcttcctaaacctctgca

SEQ ID NO: 259 - DNA, 989 bp, Arabidopsis thaliana
ccacgcgtccggaacactatcgatctaatcttttcagctctctccatcgtcgtcgtatctgtgactctcgtgatcatcgcctgaaaaaaatttgagataatggccagaaagttcttcgtcggaggcaactggaaatgtaacggaactgctgaggaggtgaagaagattgtgaacactcttaatgaagctcaggttccttcacaggatgttgtagaggttgtggttagccctccatatgtttttcttcccctggttaagagcacattgaggtctgacttttttgttgcggcacaaaactgttgggttaagaaaggaggtgctttcactggtgaagtgagtgcggagatgcttgtgaacttggatattccatgggttatccttggtcactctgaaaggagggcaatccttaatgaatcaagcgagttcgtcggagacaaggttgcctatgcacttgctcaaggtttgaaagtgattgcttgtgttggtgagactcttgaggagcgggaagctggatcgaccatggatgttgtggctgcccagaccaaggctattgccgatcgggtgacaaactggtcaaatgttgtcatagcctatgaaccagtgtgggccattggaaccggaaaggtcgctagcccagcccaagctcaagaagtacacgatgagctgaggaaatggctggccaagaacgtgagtgctgatgtcgctgctacaacccgcatcatttatggaggatccgtcaatggtggtaactgcaaggagctaggtggacaggccgatgttgatggtttcttggtcggtggtgcttctctaaagcctgagtttatcgacatcattaaggccgcagaggtgaagaaaagtgcctaatgagctcattaagcaatttaaaagtcctttgcttttccagtcgcaactctgaaaaaatgaataagttggtattatgatatgatacattttgcttcagttgtatttggcaaaagtttctctcttac

SEQ ID NO: 260 - DNA, 988 bp, Arabidopsis thaliana
  misc_feature (1)...(988): n = A,T,C or G
ttttcaaaacattcatgaggcatgttgtattattaagacaaggcaaacatgttccaagagtgagaatagaaaaagtttcaaaggcgaaagtctggaaatggatggataatcagcatttcatgttgttcccaagaagatactctggacgagaaagcagcacacgtcttcgttttagattcaggacctttattgagacttacgttcccaccattccatgaacttaacttgggctgccattgtgtccaacttgtagagttgcagtgtgtggttggcgacctcttgcccaaaggtccaaccaaaaacacctcctcctaagaaggacaatgcagcaccatgtggactccnggagtatttccaggcaaaagcagcagtagagacagctccaantnnngctccggtaacaccaaacgtcacagcttccctagccgttttcagcnnnatannatgaccacaaatacacnntgagtaccaaacgtaagatcttcagtaagaataccaaataccaaaccaacagttcagtttttgctaggttttttatgccatccgacgacgatgcagtgggcttagtcctcttgtatctgtgcttccaaggactaaagccagaaaaacctagcctagtggaactttattatatcaaaaagtaacagaaactttccaatggaaaatcaaatgaagaagaaaaaaataaaccgatgacagcagagtaaaatcgagtaccagccgagtcatagataatggaccaacaatatctatagattccaaaacacagagcgagagaaagatagaaggaaattacggtgggtccatgaacgggatcggaggcaatgaattcctcgacgtcggaggaagaccaagaaggaagaggcgcgtcgcgtttggtgaatctggtgtaattttcgaaaaatgataacctatcactccagaaatccttcaatccattccaatttttcccaacaaatgactccgaatctcccatctttctcagatc

SEQ ID NO: 261 - DNA, 987 bp, Arabidopsis thaliana
  misc_feature (1)...(987): n = A,T,C or G
ctttttttttttttttttttttttttttttttggacaaagccttaaatcatataagcataggatgcatcataaccattggttacataacaaagacaagaaacaaatgtgatctacagattattgtatttttcatgagacaactcacttctttttatgtgcttgagggaagactgacttagtttcttagccatagcatcggattggatccttgcaacctttctcagctgattgtcttaaacccatgcgacccccttttgccaggtattgctggtggtaattttctgctctgtagaatttcgtagcgggaagtatctctgtgacaatcctcttgttcaatatcttctgctgtttctcaacagcttcacgagctatgcgctcttgctcgtctgtgtagtagtatatacctgatcgatactgcgttcccacatccccaccctgacgattcaaggtggttggatcatgacgattccagaaaacatcaagcaagctctcaaagctacactctttgggatcatactgaactctnnnnacctcgttatgtcccgtagtgccagtacagacatcctcgtaactcggattgtgcacgatgccatggctatacccaacctcggtcttggtcacaccaggaactctctggtaagctagctccactccccagaaacaaccggcgccaaattgcgcgaattgctgacctgaagacggaacatcatcgtcgggtccttgggcgattgcggcggaagatgggtcagcttgggcttgaggacgagacccgaatccgagtctgttgaaaaggttgttcattggggatttgtatacggagattggtcgtcgagaggtttgagggaaaggacaaatgggtttggctctggagaaagagagtgcggctttagagagagaattgagaggtttagagagagatgcggcggcgatgagcggaggagagacgacgaggacctgcattatcaaagcagtgaccggacgcgtgg

SEQ ID NO: 262 - DNA, 986 bp, Arabidopsis thaliana
  misc_feature (1)...(986): n = A,T,C or G
ccacgcgtccgacgatcttcttcttcttcttccctcaaatatagcttaggattttcttaatttcctctacccaagctccatggctgctttcaatttcttcctctcttcttaattctctcaggtaggggagatttgagtagtagtagattgttagatttgtaattcagctattggtgaagaggaagggagagagagatgtgttgaattggttgagtttggtggaggaaagaagaagaagaaatgaatgtgagccatgcatcggtacatccagtggaagatcctcctgcagctgcgacggaagtagagaatccgcctcgggtgaggatggatgatatggaaggaatgcctggaacattgcttggtcttgcattgcgtttttttcagttcttgtttgctgctgctgctctttgtgtcatggcttctactagtgattttccttccgttaccgccttctgctacctagttgcagctactggtctgcagagcttgtggagtcttgcactagccatggttgacgtctatgccattatggtcaaacgctctctacagaaccgtcgacttgtgagcttgtttgcaattggtgatggggtgacatcgacgctgacttttgcagcagcttgtgcatcggcaggcataacggttctaatagacaacgatctgannnnnngcgcacaaaaccactgtgttcagtttgaaacatcaacggcattagctttcataagctggttcgctgctttgccttcgtttctcttcaatttctggtctcttgcatcccgttgacacgatactgctcagcaagatgtgttttcatggtgtgtttttcggtgtatagtgactgatttttcttcttctttcttgttttgggtttggaaccaactttcttcaaacccaatacttggaaactgggaattgttttgtagacgacgaccttattcattttgttgtacaatgaaactatctggtcggctttgttgtaaaaaaaaaaa

SEQ ID NO: 263 - DNA, 986 bp, Arabidopsis thaliana
  misc_feature (1)...(986): n = A,T,C or G
ctttttttttttttttatgtacaaagtgtcttttttttactcttgctcagtcttacatttaagttaaaagaggtatttgagtagagcacgcatatagaaatagaaagaaagagaagaagaaaaaaagggttacgttttctaaataatttcttagacgaataagaaaaaaaaaaaaaaaggaataagtggggattattcttgaagaggtccggtttagtattcagaggactcggagctgagcaagaaaagcagcacacagatccaagaacaagaactgaggaccttgtactctctgcaaatccagtagatacttgtcgtcccgagttttatacaactgaatttcaaacttgacaacattgggcgacttaacagctgcttcnnnctctattatgctggactcgtctccaaagtagttgttatcgtgcatcgagttactgagcataccatctgcgctgctgttaggaacccatctgcacttcatgttgtagtgccctatcttcttccaacatacattcaaatcttgcagggctttcaggacttccgtcattatttcacggggatgagcccgagactgaagtccaagagcccattttctctcaacagggtattgagatctcaagccaactccttgatattccatcagtcctggaagccgatggctaacaggtgaagcaacgctttctgctggatgcatacggggagtaccttccatggtctcttgaaactcagccccgagataaccactagaggcacggaaacgattgtccagtatcagatagtacgtcacagtgccatcattctgggttcggttgcggagcgattcgatgaggtggtttctgtcaaatcccatattgataacttcttggagaatctcctcgtcaatcttttttgcctgttgcacagtatctggaggaggaacagctaaatacctcggaagatgagcttggaaccaagggtgttgccggatctcagggatggttactcgt

SEQ ID NO: 264 - DNA, 986 bp, Arabidopsis thaliana
taacaaacgacgccggagatggccgccacttcaaccgccgctgctgcttcttcaatcatgggtacccgggtggtttccgacattagctccaattcaagccggttcacagcccggttcggattcggaaccaagaaagcatctcccaaaaaggctaagacggttatctcagaccggcctctatggttcccaggcgcaaaatcacccgaatatctcgacggttcacttgtcggggactacgggtttgatccttttgggttaggtaaaccggcagagtatctccaattcgatttggattccttggaccagaacttagccaagaacttatacggagaagtgatcgggacccgtaccgaggcggtggaccccaaatcgacgccgtttcagccatacagtgaagtcttcgggctacagagattcagagaatgtgagctgattcacggtcggtgggcaatgctcgccactctcggcgctatcaccgccgaatggctcaccggtgttacttggcaagacgccggcaaggtagagctagtggatggatcgtcttacttagggcagccattgccgttctctatctcgacattgatatggatcgaagtgttagtggtcggctacattgagttccaacgaaacgctgagctggactcggagaagcgtttgtatccaggaggcaagttctttgacccgttaggattagcgtctgatccggagaagaaggctcagcttcagctagctgagatcaaacatgctcgtttagccatggttgggttcttgggttttgcggttcaggcggctgcaaccggtaaaggaccactcaacaactgggcgactcaccttagtgacccacttcacaccaccattatcgataccttctcttcctcttgatgtggtggctcttagcttctataggtgtcatgtaatgatgtactgtcgttattttaaagaaaatttggcaccttttgtataaacagaatttcttatacctcgca

SEQ ID NO: 265 - DNA, 985 bp, Arabidopsis thaliana
  misc_feature (1)...(985): n = A,T,C or G
ctcttcttctctttctctgcctctctctttcttctctctctctcaggcacacgatccacacacacacacaaagactcaaaacaaagtcaagaaccctaatatcttaagaacgtcctgacataaccataggatcaaagatggagggagaaaccgcagccaaagcagcggcaagttcctcctcatccccgagccggtacgagtctcaaaagaggcgagactggaacactttccttcagtatctaaggaaccacaagccacctctgaatctgtctcgttgtagtggcgcacacgtccttgagttccttaagtacctcgaccagtttggtaagaccaaagtccatgccacggcttgtcccttcttcggacaacctaacccaccgtctcagtgcacttgccctctcaagcaagcttggggaagtctcgatgctctcatcggccgtctaagggctgctttcgaggaaatcggcggtggtcttcctgagtcaaaccctttcgctgccaaggctgttaggatctatcttaaagaannnnntcaaacacangctaaggctcgaggnattncttacgacaagaagaaaagaaaacgtccgcatacagacacggcaactccaatcgccggtgacggagacgatgccgaaggaagtggtggtgctgctttggtcgttacggctgcaactacggtatagtggagacgatccagctactagctagatgctaaaatcttaaaagaattacgatagatcagtacgaaagtgtgtaatggtgatgtgtggacgtgcgaagtctcgggtctaacgtgagtcgtgatttctctgaaaagtcataaatcttcaggtgctttcttttaaaagctttaggaatgatgatcatcatcttcttactttcactttattttcatgttcttctttacaaatccaacctctaaaaaaaagatttagttcttgttttgatttaggatactaaaaaaaaaaaaaaaaaaaaaaaa

SEQ ID NO: 266 - DNA, 984 bp, Arabidopsis thaliana
  misc_feature (1)...(984): n = A,T,C or G
tcgagcggccgcccgggcaggtgattgcagtgtgcaaagaagacaccaaaagattattgaagaagctcctgcggtgcttctttgatctatatgtttattaaatttaactcgataaacatttggctttccaaaggaacactgatgatccttcttaggtcgaacatcctgtaactgagatgattgttggtcaagatcttgtggaatggcaaattcgggttgccaatggggaacctctccccttaagccaatccgaggtgccaatgtcaggtcatgcctttgaggccaggatatatgctgaaaacgttccaaaaggatttcttcctgcaactggggtcctcaatcattatcgccctgttgcagtctcaccatcagttcgggttgaaactggagttgagcaaggagacactgttagcatgcactatgatcctatgattgcaaagcttgttgtctggggaggtaatcgtggcgaagctttagtgaaactgaaggattgcttgtctaactttcaggtagcaggtgtacctacgaacataaatttccttcaaaaacttgctagtcataaggagtttgcagtnggcaatgtagaaactcattttattgagcaccataaaagtgatctatttgctgacgaaagcaatccagctgcaacagaagtggcatacaaggcagtcaagcatagtgcagcattggtggctgcttgtatctccacaatcgagcattctacttggaatgaaagtaatcatgggaaagttccatcgatatggtattcgaatcctccttttagggtccatcatgaagccaaacaaaccattgagctagaatggaataatgaatgcgagggaactggctctaacctcatatcactcggtgtaagatatcaaccagatggaagctatctcattgaggaaggcaatgattctccaagtttagaactcagagtaacacgagcaggaaagtgcgattttagagttgaagcggccggat

SEQ ID NO: 267 - DNA, 983 bp, Arabidopsis thaliana
ttttttttttttttttgtgagaaaaacagatcaaattgcttaaaattaaacaattatggacacagctgtttatggtttttgtgaaattttgtcctacaacattagctatcttctctgtccaacatgaacatgtcaaagtttttctgctcaactaacccaaaactcacaacacagaatgatctagcaaccaaacaatacattgcaagaacctgagctctgctccttctgatgcaatctcgacactgttccttgtttaacaaaaatgggatgtggcaagctctcactcttgtttcttcagcgcagggtcagtatttgtgactcctgatgtcaatttcttaacactgtctttagcctctgcaacaaacgaagcgtctggcttgtgtttatccgcaggttctttcagggccagacagatgtaaaacacaataactacattgactgataccacggcaagaaatccactcagtagtgtcagagaatgtggagacaacgttgttgaccctgtcgagatttaacagagcaaaacggtcaatttctacagcatttactgttagaaactaaagctgggaaactacaacagacaagctacgtgagcctgagagagaaagagagacattatgccaaaagtacagtaaccgactaacaggctatcacatgtgtagatgatcaaacttcattacatgaactacgcgtcaaagactaaactgcctttgttacaagaagtaaggttacaaccatagaataacctcttgtagcattccagctccaactagtttctatgatacctacaaactaagttctaatcaaagaagtttgcagtttctaaaaagttacaatcagaatttctctaatctgccatcagatcccaacaaccagctattctactaaaccaagttccactaaaacttcaactacagagtttacacgattaagcaaaactcaaagttagaaccatcaatacaattagagcaatgacacagacg

SEQ ID NO: 268 - DNA, 982 bp, Arabidopsis thaliana
  misc_feature (1)...(982): n = A,T,C or G
ttttttttttttttttttttttttttttttataaataacgtttttttttattacgtagaaacataaccatttttcttaaaatgctgaaattctttacttcatacagaaaaatacattactaaaatacgaaagaaaagccacccacaatcttaaacaaacggtgagaaacactaatcaagttcaacagtctctccatcaaacagactccaaagttgctcaacgtcaaacgccaaagtggccccatgttcagctgtcgtcgcttcaggaacaatcgcatcagcttcttggttttcccccagtaaattctccaaccacatattatctccattcattagattattcacaaaatcatctttctcatcatctttgttacatgtgatactattttcacaaacattatttttcttgagtccaaggcatgaaggaattaaatcaacttctggcagaccattgagatggctgcaaccattgttaacagagaaggatcgaggtcgaggcttaaaaacaccgnntttttggaccggtgttgtaggaggggaaataatgtttttctttttcattttagacttacaacacgaagactcatgttttttactcagatgggtgttccagtaatttttgacatcattagcggtccgaccaggcaatcgaccagcaatcaaggaccacctatttcctagaagcttatgaaggcgaagaagaagatcaacttcatcattgctaagtcttcctctcttgatacttggcttcaaatagttcaaccatcttagtctacaactctttctgcatcgatttagcccagctctcaaaggaacttgatgccatttgccttctccatacttatcaatacatagcctcaagagactatcttcttcagcagtccatgcacctttcctcaaccctttggacgaaccctccatggaccaaagaaaaattaatataaaagtattttatcggattattctaaaacttttttaaaaaa

SEQ ID NO: 269 - DNA, 982 bp, Arabidopsis thaliana
  misc_feature (1)...(982): n = A,T,C or G
ccacgcgtccgtgatgcctcaaaaagcgaaggccacaggcaaatattgactaaggaacttgaggcagtgggcttgcgactaaacaaaactcctccgcagatatactttaaaaagaaaaagactggtggaatctctttcaacactacagcacccttgactcacattgatgagaagctctgttatcaaatcctgcatgaatacaagattcacaatgctgaggtgctatttcgtgagaatgccacagtggatgactttattgatgtcattgaaggcaaccgcaagtatattaagtgtgtttatgtctacaacaaaatagatgttgttggaattgatgatgtggatagactatcccggcagccaaattccattgttattagctgcaatcttaagcttaacttagacagactacttgctaggatgtgggacgaaatgggccttgtgagagtttactcgaagccgcaaggccagcaaccagatttcgatgagccttttgtcctctcatctgatcgaggtggctgcacagtggaagacttctgtaaccacgtccacaggactctggtgaaggatatgaagtatgcactcgtttggggcacaagcacaaggcacaatccacagaattgtggtctttctcaacatcttgaanncgaagatgttgttcagatcgtcaagaaaaaggagagagacgaaggaggaagaggccggttcaagtcacactcaaacgcccctgctagaattgcagacagagagaaaaaagctcctcttaagcaataagcttttagctgataagtcatctccatacatccatctccaccatcatagtcgtggatggtttcacctgagtaagatttactatgttgtatctgaatccgttttgttgtnnnctctcacaatataagttttggaacaattttacttttttgagatacaaatggaagtacgagttcctatttaccctttttggtaagctaagtttttgattaaa

SEQ ID NO: 270 - DNA, 982 bp, Arabidopsis thaliana
  misc_feature (1)...(982): n = A,T,C or G
tcatcttcttcttatctccctccaaagacggcgactgtataatctatcatttcttcacagtaacgctttcatcggaagatctcgccggaaaaaaacttctctctgagatcagatctcttacgattctcagctcaatcttatcttttcctttgttgtgctgcttttcactctcttctgcgcgacgaatttggccttgttttttgtttgtttgtcgtatccgacgcggaggtattgagaaaccgtggcttaagacggaggaagaagatggaagctaacgggattgagaacttgacgaatccgaatcaggaaagagagtttataaggagacatcataagcatgagcttgtggataatcagtgtagctctacgcttgttaaacatatcaacgctcctgttcatattgtgtggtcacttgtgagaagatttgatcagccacagaagtataagccgtttatcagtagatgtgtggtgaaaggaaacatggagattggtacagtaagagaagttgatgtgaaatctggactaccagcaactagaagcactgagagattggagttacttgatgacaatgagcatattctcagtatcagaatcgttggtggtgatcatagacttaagaactattcttcaatcatctctcttcaccccgagactatagaaggaagaataggaacacttgtgattgagtcatttgtggttgatgtaccagaannnnacacaaaggatgagacttgttactttgttgannnnnnnancanatgcaatcttaaatctttagctgatatctctgaacgtcttgcggttcaagacacgacagaatcgagagtctaaagatcaaaggagtaagaaactattgaatcagagagattttggttgccatggatgaagctctcaaagggaaaaagagagagtgggtgagtttctttgaggatggacaaggcaaaaaaagtatcatcatttatccagttacataataagtttc

SEQ ID NO: 271 - DNA, 981 bp, Arabidopsis thaliana
  misc_feature (1)...(981): n = A,T,C or G
ctttttttttttttttttttcaggagtaaaaactcttctccatattttgaatattagtcgaagaaggaaaagcgcaaggactaaaagaaaaaactgtcattccgcagatgagtggattatatagatgtgtctctctcttgtagtaaggaaaagaatggattctaaccagaggagatgatttgcttgaggagtctttgatcatgacaatgcttttttaacctctgatgtaacttcttggggagccttctcggcctggatgtttgtgagaacggccttctttgcgtagtaatcaatcaccggttgagtttgactgtggaaagctgcaagcctcgactttagaacatcagcgttatcatctttacgttggatcagaggctctccagtaatatcatcaactccaggggttttgggaggagcaaatttagtgtggtaactcctgccactcgatgggtggatccatcgcccggttattctttcctccaagattgcgtcatcaatagcaaagttgagaactttgtcaatttcagttcctcgcctcttaagcatctcatcgagcttctctgcctgagtaacagtcctggggaacccatcaaggataaatcctttttgacattttggcttgttcatggcttcatcaattataccaacaaccaaatcatcagagacgagctctcctttttccatagcttctttagccttgacaccaagaggggtcttagaagcaacagcagctcttaacatgtctcnagtggataagtgacannngnnntactcatccttnactnnnngagattgagtacctttccctgaccctggaggtccaatgaagatgaggcgtttgtcgggcttctgagaacacttgaggcggcggaggagctccgacatgagatccaccgtctgaacatcttccaaatccgccgcagcaccaccggtcgccatagctgatctagtttagctcagaaaacttcgtcggacgcgtgg

SEQ ID NO: 272 - DNA, 981 bp, Arabidopsis thaliana
tttttttttttttttttgttttgtttcgaggcataaattaaaaacataacgaaaacatagttcagtcttatgttccaaaacgggcacataagcaaaatgcgaaaaaaataacccttaattaaagaaccttcataaacactccaaaagcttcattatctacacctattcatattatcgttatagtccatagaaatcttccaaattaaagttttaatataaaaaaaattacacaaaccgattttttgtttttaatccatgatcaagcttcaaatcctatgtgtttgaagctgtaacagccttgaataagctccctctggtcggctaacgagctctgaatggctgccttgctccacaatccgcccgtcttgaatcacaccaatgcaatcaacacctcttatggtggacaagcggtgagcaactaccacggtggtccgacctctcatgagcctctctaacgcctcttgcagcacgcattctgattctgcatctagtgcgctagttgcttcgtctagaagcaacactgtagggttcttgagcacagctcttgctatcgcgatcctctgtttctgtccacctgataactgcactcctctttcgcctactggagttttgtaaccttcaggtaaaccactgatgaaaccgtgagcatttgcggctcgagctgcatcaattacctcggattcagttgcaccatctttaccataggcgatgttgtcgaagatcgttgctgcgaagagagctggttcttgttgaacaagaccgattttgagccttagagatttcaggtttagccggcggatgtctttgccatcaatcatgacttttccagcaagagggtcgtaaaaccgctcgatcatcgcaattacagaactcttccctgacccactcgcgcccacaagagcttggctatgtccagctcgaattctgaggttaaagtccctgaaaaccatgacgtcgggtcttgaagggtaagcgaaatca

SEQ ID NO: 273 - DNA, 981 bp, Arabidopsis thaliana
  misc_feature (1)...(981): n = A,T,C or G
tttttgagagagatatggtttatagaatagggcaaagagaaagagtgtactacagagatttagctttaaagagtgtagcagaacacaatagtcgttcagaagaagaagtaatcacattttcgaataaccaaagttattatcatactgagtcatgaactcgtcgttgaacttcttgaagctatccatgatctccggcatctcatcttctgctggcaggattgttgtcctcagatggaacacaccttctttctgtccaaatccagagccaggtactgtggagattcctgtggcttctaagagcttgagacagtagaaaacgtctggcacttttccagcttgttttgcagcttggagagctcccgttggtaaccgtatttgaggaaacgaatacattgcaccttctgtgaaattgcacacgacgtttttgcagctgttgaatccatctgtcatgagccttgctcttcttctcaaagattcaagaatccccttgctttcacgggcgaactggtcatatgaaatgtctccaggctttggaggattaaccatcaaacccataaagatttgcgcagagacattagggctgagggcaattgatgcaaccttgtatatctcctcaacaacccttggagggaggttggtcatctcaaagtatccacctcgctgtccacattcaccccaatatcctttagagactgtgtgaaaagatacaagctgaacttccttgctgaacggcgaacccatttccatcaaaaccttnnnnnagctgataaagggacgctcatcctggtatatgttctgctgataaacctcgtctcccagaagaaccagtttctcgttataacagaacttcaatatctctcttatgttagcttcgcttagacactggccagttgggttcccagggttaatgatcaccattgcccttactgttatcccttgagaacgagcctgagcaacggattgtcgaaggttagcaacatc

SEQ ID NO: 274 - DNA, 980 bp, Arabidopsis thaliana
  misc_feature (1)...(980): n = A,T,C or G
gtgaaatcgaattttatgttttgaaaatctgggaattgctttaaagattgaagtttgttggaatgtcttgtatcaattttacaatgtgtgttatatgaggtcgatcttgaggttttaaggcaacacaagccaaacctatttgcaacatctcaaccaactcttcttctatacccatttgcatcattagctcattatcgaatacttctcctgtccactctttcgacaccactgaccttatccagctcgccaagtccatgttttcgtctagtgatagcggactcgcgggtgatttccctgttagaagctcgagtaacaccaccccgaagctgtatacatcagagaactgtgtggactttcttgtatctgttatctcaggtgcgtggtaacccgaagaacgtaaggtagtctgcgggagagatttcgtgatgtgtgttaagccgagatcgcagatgcagccgtagcatttcgagttcgtgaagatattggaggatttgatgttaccgtggacaaacttcccgtcgtctgcttcgtggattatagnnanccctcttgctgcaccaatgnnnnntcttaaacgggantcccaatctaaaggtacttggctctctccgtgcagcatctcaaataggtttccttgactgtaataactgtannnnnngagcttatcgatctnggaatagtagtaggctttaagctcggctacattatcatgcctgattctaccaacgatctccatttgttgctcaaactctcttctcccaacaaccacctcctccaatctcttcactactaccgtggctgtgtcttccacagctactttgtaggttgtaacatgagcgcctttccccaaaatttctgcagatgcagctaacaaatcatccaaatcaaaggtatagttacttcctccaaagaaaacgattttcccttcatcattgtcatcttctggtgcccagtttcctgaatgagacaaatctctcttc

SEQ ID NO: 275 - DNA, 979 bp, Arabidopsis thaliana
agctatacaacattacaactacctatttaggtgaaactatatattcatacatccattagttaatttataaccaaaacagccatccattaaataatattcatacaaattggataaaaattacaacgaaaccggaccaaactccaaacaaaacaagaaagatcgaggcaaagtaaccaaacacagaaacatgaatcaagaatcatcacttgtttccttagaaatcagcagaagcaagaggaacatgttcggaagaacccatgaagacatttccgtagataagtccggcaagtccaccaccgatgagtggtccaacccagtagacccagtgaccagagaagtctccggcagcaacagctggtccaaaggaacgtgctgggttcatggatccaccggagaatggaccggcggcgaggatgttggcaccaacgataagaccaatggcgagaggagcgatggttccgagagaacccttcttgggatcagcggcggtggcgtagacagtgtagaccaaagcgaaggtgatgatgatctccatcactactccttctatcgatcctagtccagccgcaacgctgtgggttggaaccgccaatccaccggtgacgtatttaaggaggaaacaagcggcggtggagccgagaagctgagcgatccagtagaaaactccggtgatgactgtgatttgaccaccgacagcaagaccaaaagtgacggctgggttcacatggccaccggagatgttggctccgattgcaacggccacgaagagagcaaaaccatgacaaaccgcgatggccactagtcccggtgtatcaagagcagcgtccgacgtcagctttgcgtaggcaatggcagagccaacaccagcgaaaacaaagagtaaagtggagatgaactcagcgaggtaagctcttagagaagccaagctgaatgaatcatcaaaggaaccaaaggcaactccagccattcggacgcgtgg

SEQ ID NO: 276 - DNA, 977 bp, Arabidopsis thaliana
  misc_feature (1)...(977): n = A,T,C or G
tgtgggttggatttgaatcctctcttactttccaaaggtcataccttttcacagatctatctttgaaattgtgaagaagaagaagaagacgatgattcgactaagaacatacgcaggccttagttttatggcaactttggctgtaatttatcatgcattcagcagtagaggccaattttaccctgcgactgtttatctatcaacctcaaagatcagtttggtgttgctnnncaatatgtgtttgnnnnntatgcttagtctctggcatttggtcaaatttgtcttcttggggtctcttagggaagcagaagtcgagaggctaaatgaacaagcttggagagaacttatggagattctcttngccattactatctnnngacaagacttttnnagtgggtttcttccttnggttgttactcttctgttgatcaaggctttacattggcttgctcagaaaagagttgaatacattgagactactccttctgtctctaagctttctcattttcgtattgtctcttttatgggtttccttcttcttgtggatagtttatttatgtacagttctatacgccacttgattcagtcgcgtcaggcttcggtttctctcttcttctcattcgagtatatgatactggcgacaacgactgttgctatttttgtgaagtatgttttctatgtcactgatatgttaatggatggtcaatgggagaagaagccagtttatactttctatcttgagcttatccgtgacctgcttcacttgtccatgtatatctgcttcttctttgtcatattcatgaactatggcgtgcctttgcatttgttacgggagctctacgaaaccttcagaaacttccagattcgtgtttccgattaccttcgttatcgtaagatcacgtccaatatgaacgacaggtttcctgatgcaactcctgaagaacttactgcaagtgatgccacatgtatcatatgcc

SEQ ID NO: 277 - DNA, 976 bp, Arabidopsis thaliana
  misc_feature (1)...(976): n = A,T,C or G
acaaaaaacaacaaagtttcattttcatattaacacaaaatctccatacatattaccaaaccaaaaaaatacacaagggggagagagaccaacggttcttggttcagagtttgcatcttgtttgagccgtcaccgtttcttagacttaacagccacaacacctttataaagcttcacgcgatccttcaacgcatctcgccgaggccgagccaccttattgtttggatcaaacaacaaaacttcttcaaacgcattcaatgccaaaggcaactccttcttcttctcataagcatccccaaggttgttccaagctgttacataaccgggttgcagcttcaccgccatttcaaactgagcaattcctttgtcaagtttatcctctcgtacataactcactccaagagcgttatagacctgagcaagatcttgatcatcaccgtcccatttctggatagcttgttgcaaaaacttgttggctgcaggataaaacttccttctcaacatcactgcaccaagctcaaagagctctgttgcacttgcatctccgctccttacttgctcctgcaattctttagcggagaggtctagttctctgcgtacaagtacttgacggatcacatagaaagtaccaactccaagcaaccccagtagtaacagcaagtaagaaagctgaatactaagttcaaataactctccaacttcgtaaatcggttcaggctttatgatttctgctgctgctgccaactgtgggtgagcagaaaccatcaacaagctctgccccagcagaaaggtagatcctttgattggtagcttcttcaaggaagctttgttcaaagccggnnnacctnnnnnnnnaatttcatgaaaagatcgaatggccaaagtccttccatgtatctgaagagaaatcttgctgggtgacccagaagaagggagaatctgagaatggtgaagatagagacggtgaattggagga

SEQ ID NO: 278 - DNA, 976 bp, Arabidopsis thaliana
  misc_feature (1)...(976): n = A,T,C or G
ccacgcgtccgtgcaatcaccatttcttcctccttgcacgcctcagcctctccgcgtgttgttcgtccacatgtttctcgaaatacccctgtgatcaccctctattcacgcttcacaccatccttctccttcccatctctctccttcacactccgtgacacagctccgtctcgtcgtcgttccttctttatcgcctccgccgtcaaatctctaacggagacggagctgcttccaatcacagaggctgattcaatcccgtccgcttccggtgtatacgctgtatacgataagagcgacgagcttcagttcgtcggaatttctcggaacatcgctgcgagtgtctctgctcatctcaaatctgtgccggagctttgtggctccgttaaggttggaatagtagaagaaccagataaagcagttttaacacaagcatggaaattatggatagaagaacatataaaagtaactggaaaagttccgccggggaataagtcagngaacaacacatttgtcaaacaaactccgaggaagaaatccgatatccgtctcactccaggtcgccatgttgagctcacggttcctttggaggaactgattgaccgtttagtgaaagagagcaaagtggtanctttcataaaaggatcaaggagtgctcctcaatgtggattctcacagagagttgttgggattcttgaaagccaaggagttgattatgaaactgttgatgttcttgacgatgagtataatcatgggctaagggagacgcttaagaactacagcaattggccaacgtttccacagatatttgtgaaaggagaacttgtaggaggatgtgatattttgacctcaatgtatgaaaatggtgaacttgccaatatcttgaactagtttcatccgattttcttctctatttctagttgtaactccaaacattcattatagagaaaacatgcttggattctcttccaaaaaaaaa

SEQ ID NO: 279 - DNA, 975 bp, Arabidopsis thaliana
  misc_feature (1)...(975): n = A,T,C or G
ctacaccatctagaagacccttaaccatggctgtcgggaagaacaagaggatttcaaagggtaggaaaggaggaaagaagaaggctgttgatcccttctccaagaaggattggtatgacgtgaaggctcctggttctttcacgaacaggaatgttgggaagactcttgtttccaggactcagggtaccaagattgcctctgagggactgaaacacagggtgtttgaggattctcttgctgatctacaaaatgatgaggataatgcctacaggaagatccgtcttagagctgaagatgttcagggaaggaatgtgttgacccagttctggggtatggatttcacaaccgacaagctaaggtcattggtnaagaagtggcagactttgattgaagcccatgtcgatgtgaaaaccacagacggctacaccttgaggatgttctgcatcgccttcacaaagagacgtgctaaccaagtgaagcgtacctgttacgctcaatccagccaaatccgtcagatccgcagaaagatgagtgagattatggtgaaggaggcttcatcttgtgacctcaaggagctagtggccaagttcatcccagaggccattggaagagagattgagaaggcaacacagggcatctacccgttgcagaatgtgttcatccgtaaagtgaagatcctaaaggctcccaagtttgaccttggaaagctcatggaggtgcatggagattacacagcagaggatgttggtgtgaaggtagacaggccagctgatgagacaatggttgaggagccaacagaaatcatcggagcttaggggattatagatttgtttgttttttcgctggcaaaaaaaaaaaagaacctaatgttatgtcgccattggtgtgactggttttggactcgtttttgatggatgatctttattgtttatcatgttttaccttttttattatatgtcttagttcttaaaaaaa

SEQ ID NO: 280 - DNA, 974 bp, Arabidopsis thaliana
gcgtccgcactgatccttctctcatcctcagaaagaatggctcaaaccatgctgcttacttcaggcgtcaccgccggccattttttgaggaacaagagccctttggctcagcccaaagttcaccatctcttcctctctggaaactctccggttgcactaccatctaggagacaatcattcgttcctctcgctctcttcaaacccaaaaccaaagctgctcctaaaaaggttgagaagccgaagagcaaggttgaggatggcatctttggaacgtctggtgggattggtttcacaaaggcgaatgagctattcgttggtcgtgttgctatgatcggtttcgctgcatcgttgcttggtgaggcgttgacgggaaaagggatattagctcagctgaatctggagacagggataccgatttacgaagcagagccattgcttctcttcttcatcttgttcactctgttgggagccattggagctctcggagacagaggaaaattcgtcgacgatcctcccaccgggctcgagaaagccgtcattcctcccggcaaaaacgtccgatctgccctcggtctcaaagaacaaggtccattgtttgggttcacgaaggcgaacgagttattcgtaggaagattggcacagttgggaatagcattttcactgataggagagattattaccgggaaaggagcattagctcaactcaacattgagaccggtataccaattcaagatatcgaaccacttgtcctcttaaacgttgctttcttcttcttcgctgccattaatcctggtaatggaaaattcatcaccgatgatggtgaagaaagctaaattatcatgtacttaaatttagtagagagtgtgtgaccttctcttcatgttgagacaaaaggaaatggacagcttaaattgttgtaatacttatatccttttgtttttaacttggaattttctgattaaaaaaaaaaaaa

SEQ ID NO: 281 - DNA, 974 bp, Arabidopsis thaliana
tttttttttttttggtttcctttaaaagccattcaacactcaaaagtcaaaaacattcctcagtgaaatttggaagcaaactgaaaaataaaaaataagagagcaaaatacaatataaaacaaaagaatttagcaaacagaaccacacaaacatataagtcggtaaaagagagaaaaacaaaacacaatcaacaatcatatgatcaagttctaaactaagaaacactcagacgaaagatgcggcttttgttactcacaagctaaaggcttaaccttgaacctgtagataagcattttcttggtcgaagtcgggttatcaacagttagcaaaatcctgccaacttctccaactttgaagctatgagacaccaccagttcatttttcgcagtcatcttcctcggtttctgaatgatcactgtatacccttctttgttctccggcacaaactccgctccatacgaaacctcccatcccactactcttatctcccacacgattgtacatttctcgtaaacaataatctcgacggtttgtttagtagttggtttaacagtaatctcggtagcgatatcatcgtgtgtgaaatccgagttacactcgcaattatccacacttagtccaccatactgaaccgggacatgttcgggtgatatgtacttgagaagggtttctgcagatcttgaaggacctgcgaaaactagtttgctctttgacctttgtgacataaaaggactaataattctatagaacgcaaggtaccaccatggaacattgatgaatatctgtttagagacaaactcagggtaattgtcttgaagaagatgaagagcttgcttagtagctaacctaagctcagtcttaccaggtcctggagaattcttaagatcatttacttgacatatcgtggaaacaccaccagctacaaaatcaagattcctgatactcttttcaagaaactgaatcctccatctca

SEQ ID NO: 282 - DNA, 973 bp, Arabidopsis thaliana
tttttttttttttttgacaacaaaataggactttcaccattatgcatctatttgcatataccatgtagtcagaaactggcttacaatagaaattaaatggcttatgtttagtacatgactcaagccaagtacttctccagcttctctacttcctctgtgcttccaatgtatagaggaaccctctgatgtatctcagtcggttggatatctagtactctcgaatgtccatcagaacctttccctccagcttgttcaacaatgaaactcattggtgcacactcatacaacagcctaagttttccatttttgctctttgcgtcacgagggtacccgtaaatcccaccatacaataaagtcctgtgaaaatctccaaccaaacttccaatgtaccttgcggagtaaggcttcccagttggaccagggtccttaagatcatcaatgtacttctttagtttatcgtcccacatctggtaattcccttcgttgaaagagtagattctcccggctttggggatctcaatgttttcttgcgtgaggacaaactcaccgtacattggatcgagcgtgaaggagaaaacgcctttgcctagagtaagaacgaagatgaccgagctcgagtacatacagtagccggctgctaacaagttgttccctggctggcacacgtttactatacacctttgttcttctgacccaagagctgagatatcgtcggagtcgtcgacaatgcattcgtcattggggctatagataccgaagatagaaccagtagagacggcagcgtcaatgttggaggaaccatcaagagggtcaaacacgacgacgtagttgccggagtaactctcctccaccgcaactggcacgtcctcttcctccgaggctatgattcccgttcttccacttgatctcaaacagttggaaaacacctcattagagatgacgtcaagcttcttctgatcctctccctgaatat

SEQ ID NO: 283 - DNA, 972 bp, Arabidopsis thaliana
  misc_feature (1)...(972): n = A,T,C or G
gagcaaagtagtgtcaaagatataactctactaaaagcagcaacacctacaaagtttagttcttcaagtgatgatcaaaagtattttcttttacgagtctataagtgaaagcgaaggactgttgataagacttctacttcctgacgatattgagatcgatgtgtacatacgcaagcgannnacaaatactaagaagaaagccgatacaagcatgaatggttccgctagcatgtatattggtttgaatgtatagtacacctggaagggtacgttgtgagtgggaactacgttatctttttgcaacacaaccacggttcttcccacaatgtcaaggtatgagtatttgacctgcaactcttgattgactgtaaagggcaaaacagcagaagggtcctttgatccttcaggaagcacgactttgatagtcaacttgttaacaatagtttcgacgagcgggcacccaaaggtaaagttcaagtaacgtctgccatcagatgcttcaaagagatagtcttccaatggaactctatagccgatgataaaagttgcactccaccctccaaataatgggtagcggggttcaaattcaagttctgactttctaaagcctgtacgcaaatgtgaagtagagatgtttcctatctcatccctgtagtagacagagttcactctgggaggtaggactgcaaggagcgcattgaaagaggatgcaccactgaccgatcgtttagattgataatcaacccttgagaaaacacccttatgcctcgctcccccatgagtcaacctataattttctgtaatctgaaggctaccccagtgtgaaatctcaatttcacgcacaagctcctcaacaacagcaaatggactgttattctcgaagtgaatgatgacaggtgtgtaagagtatgaagcacgattttcatatggtccatatttgatctctttgccagcccggttagcaggttcaat

SEQ ID NO: 284 - DNA, 972 bp, Arabidopsis thaliana
ctttttttttttttttttttaagaagaagttcgacttgtcattagaaagaaagagataacaggaacggaaacatagtagaacacttattcatcagggattatacaaggccccaaaacacaaaccaccaaagttttacatgaaacgaaacattgaacttcttaagcataacagagacgagatttagaaaccaccacgaagacgcaggaccaagtgaagagtagactccttctggatgttgtagtcggccaaagtacgtccatcctcaagctgctttccagcgaagatgagacgctgctggtccggaggaataccttccttgtcctggatcttggccttgacgttgtcaatggtgtcggagctttccacttcaagggtgatggtctttccggtcaaagtcttgacgaagatctgcatacctccacgcagacgcaacaccaagtgaagggtcgactccttctggatgttgtaatccgccaaagtacgaccatcctccaattgttttccggcaaagatcaacctctgctggtccggagggattccttccttatcctggatcttggccttcacgttgtcaatggtgtcagagctctctacctccaaagtgatagtctttccggtgagagtcttcacgaagatctgcatacctccacgcagacgcaagaccaagtgaagtgtggactccttctgaatgttgtagtcagccaaagttcttccatcttcaagttgctttccggcgaagatcaatctctgctggtccggtgggataccctctttgtcctggatcttggctttcacgttatcaatggtgtcagaactctccacctccaaagtgatggtctttccggtgagagtcttcacgaagatctgcatacctccacgcagacgcaagaccaagtggagtgtggactccttctgaatgttgtagtcggccaaagttctgccatcttcaagttgttttccggcgaagatca

SEQ ID NO: 285 - DNA, 971 bp, Arabidopsis thaliana
ctgtttttctcaccgtcgcttctcttatctagtctccccttttattttctttcttttaaagcttttcccctttgttttccttttgatgaaactttttcaaacccttccaatcaatgttcctcaccctgcgtcggtttcagattggttttcaaaaccaatagaagaagataagttgagacattgtgctcttcccttctcccactctttcctcgcatctccttggacagaccctttttcggatctggttccttgtgtaggaaaggctgtgaacccctggaacctcaccccttacccgaaccacggctagagcctgtcctcatcgatccttcattcatcggagaagatccatgtgctgcaaatctcttcgccattctcggacggctgccgcaaccactctctgttttggcatcctgaagagatcctagggttttccccagtggacctagactcttcagttggcccaattcatccaaaaaggcccaagcccatttgctggtttaataactctaaagctttctccctcagaccaattgcctcaccgtctttgccgcatttgaccggagagacccgcatttgctttggattttaaaaccaccctcacctgactatagcaccatagtctcccgaatcattggtatcgtgttactatgggtaatgcagcttgctccggcgagaatcatatcattgattcgtttatcaacgtcactatgtctttcgaccgtgactaatctgtcgttcttcgaacccttcgaggatgatctctcgatttaccgtgacctctcatgttgcaatgcgctactttgcccttgcctcaatgctttcatggattttaaatcgttaaacactatctatctttctttggtattggggaatgcctcttcttgtcttgttgtaatttttgagttttttaaactcttttctttgtacttgtttctatttgaatgaatgaaaacaaggtttgacaaaaaaaa

SEQ ID NO: 286 - DNA, 971 bp, Arabidopsis thaliana
  misc_feature (1)...(971): n = A,T,C or G
aagacgacgaaatgttggagctacgtcttgttcagggctcgttgttgaagaaggttctagaatcaatcaaagatctggtgaacgatgcgaatttcgactgctccagcactgggttctcactccaagctatggattcgagtcacgttgctctggtgtctctcttgctaagatccgaaggcttcgaacactacagatgcgacaggaatctctccatggggatgaatctcggcaacatgtcgaagatgctcaaatgcgccggaaatgatgacatcatcaccatcaaggctgatgacggcggcgacaccgttaccttcatgtttgagagccccacgcaagacaagattgctgattttgagatgaagttgatggatatagacagtgaacatctgggaatacctgatgctgagtaccactcaatcgtgaggatgccttccaatgagttttccaggatttgcaaagatctcagtagcattggtgacacagttgtgatctctgtgactaaannnnncgtgaagttttctactgccggtgacattggaaccgctaacattgtgctcaggcagaacacaactgtagacaagccggaagatgcaattgtgatagagatgaaggagccagtgtctctctcatttgccctgaggtacatgaattccttcacaaaggcaactccattgtcagacacagtgacaatcagcttatcgtcggagttgccagtggttgtggagtataaggttgctgagatgggttacattcgttactacttggctcctaagattgaagaagaagaagacactaatccctaagaccccttttatatccacaatttctcttcattctaaaatgttgaagatttattgacaatgttggtgtttttttttggtgagattcctttgtatcccccctctagaatcagttgttttcttgacttattatgttttatgataacaaagttcagcaaaaaaaaaaaaaaa

SEQ ID NO: 287 - DNA, 971 bp, Arabidopsis thaliana
  misc_feature (1)...(971): n = A,T,C or G
ccacgcgtccgggcgaggattcttatgtcagagaaatgtatttgaagggacgaaagtatttcctctatgttcatagctacctacattacgggttactggctgctcgggctgagattttgaaagtttctgaggactctaacaacccctgtatcgcgactggatatgctggtacctacaaatatggaggaaaagcgtttaaagctgcagcttctccatccggtgcaagtctagatgagtgccggcgagtagctattaacgcactcaaagtcaataattcattgtgtacacacatgaaatgcacttttggtggagtatggaatggtggaggcggtggtggccagaagaaaatgtttgttgcatcatttttcttcgatcgagccgcagnggctggttttgttgacccaaaccaacctgtggctgaggttcgaccacttgactttgagaaagcggcnaacaaagcttgtaacatgagaatggaagaagggaaatcgaagttcccacgtgtggaggaagataatcttncntacttgtgcttggatcttgtttaccaatatactcttctcgtcgatggattcggattgaagccatcacagacaataacgttagtgaagaaggtgaaatacggagattacgccgtggaagctgcgtggccactaggaagcgccatagaagcagtatcctcaccatgaggaaggcaattttgggtatttgcactaaacctcttattcttttagtttctcccaaaatcaccccaagctttttttgccttacctcaaattttttttatcgtcaacatcttccttactatcaatttttgttacaataatcatctagagaaaagagtttcaattcttaatatacctataattttatttttcttgtaatctaaactgcttaccgcatacgtaacctctgtttctttcttataaaatattttccttgcgttaaaaaaaaaaaaaaaaaaaaaaaag

SEQ ID NO: 288 - DNA, 970 bp, Arabidopsis thaliana
  misc_feature (1)...(970): n = A,T,C or G
tataggtttaggaattaggatatggaccaaggcagagtaaaccaattgatcttacaggtttggtgtttagagattgcaatgtggagaacaaagaaggatcatcgcgcataaagctcctaccgatgagtgaacagataacattgatttactatatgaaaataagtgatgtgattttttaactccaattaaaaaaaaaagaagtcttttaaagcctagaagaattcaaacattcgagaagagtaagcaaaaaggagaaacggtgacagtaaaacatgaaacaaatcgagcaggtcttaaaccacaagaaatcaagtcgactccggagagaaagcttcaatcccctcaccaaaactatctggtcgagataacctcaagctttgctagcaatgttgttggaaagccaatccagaccttcatagagcccttcaccgctagttgcgcatgtgctttggatgtaccaggggcgttgccggannnnnnnnaggccaannnnnncagtaatctcagcagcattcatagcgtttggaagatcctgcttgttggcaaacacaagcaatactgcatcccgaagctcatcttcattcaacatcctgtgaagttcatctctggcttcaacaacacggtctctgtcattgctatcaacaacaaatatcagaccttgagtgttttggaagtagtgtctccacaagggacggatcttgtcctgacccccgacatcccaaaccgtgaagctgatgttcttgtactcaaccgtctccacattaaacccgatggtgggaatggtggtgacaatctcaccaagcttgagcttgtacaaaatggtggtcttaccagcagcatcaagaccaaccataaggattcgcatctccttcttggcaaaaagccggctaaaaagctttgcaaatgaaagccccattttccttttaactgttgatcctttggagaattgaaagggatctaaaccgagaga

SEQ ID NO: 289 - DNA, 970 bp, Arabidopsis thaliana
  misc_feature (1)...(970): n = A,T,C or G
cctagtaaagagattgatgcgaaaatgcgtgatgaagcgaaaaggcaacaacctatgagggcggagaaacaagaaagacaagactctatgacgagaatatcacacgagagaaaatttgtaccaccggtcaaagcaaataactctctgtcaatgacaatggagaaacaatataaagatttgaggagtaggaacgatagtttcaagtcgtttaaggaggagaggactcctcatggaccagttcctgattatcaaaatatgcagcacaacagaaacaatcaaactggtgtgagaatttcacactcaggtccattgatgagcaaccggaacatggctaagtcaacaatgcatgtgaaggagaatgcacttcctagataccctccagctagagtaaacccgaagatgttatcaggctcagtctcctccaaaacattattagaacggcaagatcaaccagtcacgaaccaaagaagaagagatcggcgagcatacaatagagctgatactatggatagtagacatatgacagcaccaattgacccatcttggtataatcctagtgatagcaagatttacatgtcaggaccattgttggctcagccaagcagagtggaccagatgcttgaagaacatgacagacagcttcannaattcaatanannnncactcnagacaccacaaggctgaaatcattggaagagccaaattattgagcgttctaaaaagccgaatcagttgagtcagatttgtcactataatctattggtttcataaattgagttgatgtgatcggcttaaaggcataaaccactactgttcgtatagagttcgctgtgtgtacatatatacaaaatccctttgaattcattattccttctaaaattgattgttgttccgttgtaattatannntttaattgtaatatttggttgcctcagaatcacaatctctctttgcagcttaaaaaaaaaaa

SEQ ID NO: 290 - DNA, 969 bp, Arabidopsis thaliana
atgttgttggatggtttaacgagcatgctcagaagcttcttgagcttcatttagcttctggttttacaaagtgtcttacttggctcagaggcaacagtcgaaaaaaggaccatcatggtttgatccaagagggtaaagatttggttaattacgctctcatcaatgccgtcgccattcgaaaaatcctcaagaaatatgacaagattcatgagtctaggcaaggacaagcgtttaagactcaggtccagaaaatgcgaatagaaatccttcagtcaccgtggctctgcgagcttatggcgtttcacatcaatctgaaagaatctaagaaggaatctggagctactataacttctcctcctcctcctgttcatgcattgtttgatggttgcgctttgactttcgacgatgggaagcctttactttcctgcgagctctctgattccgtcaaagttgacattgacttgacttgttcaatatgcctggacacggtgtttgatccaatatctctaacctgcggtcacatatattgctacatgtgtgcttgctctgctgcatcagtaaacgtagttgatggcttgaaaaccgcagaagcaactgaaaaatgcccgctttgccgtgaggatggggtttataaaggtgctgttcacttggatgagctcaatattttacttaagcgaagctgcagagactattgggaagaaaggcgtaaaacagagagagcagaaaggttacaacaagcaaaggaatattgggattaccaatgccgaagcttcactggaatatgatatagtttgatttgtggcttcttaagtgagattcttgattttgataataagatagtaaaaataatcttaattttgatttgctttcctctgtgagtgtgtttccttgcacagagagtgacgatttctttgtgaaaaaactgaaaactcttaagcattaaatatggtttataagtttgcataaaaa

SEQ ID NO: 291 - DNA, 968 bp, Arabidopsis thaliana
aaagctgattcatgcatgtttatgttagtatacagagctttaaacaagattaaaaactaaggagtgaaatgtcctctatgaacagagatacaagtaatggccggtttagctattggtgtttccagcatcaagtctggtgaacgtgcgctcttgcatgtttgctgggaatttagcatataggagagatggaaactcttctttttcccaatgttccatctatagcggaattgttagatgacgctgaagttgttggatttgatgaaacaaaggaggaacgttttttctttaagatcatttgctgattcttgtttccttacctgaacactccacaaccaagcttttatcccaagctctttgcttatagctgacttagaggttggattgtacagggaaaagctcgcagtgatatgactatggaggaaaggtttggtgcagcacacagaaggaaaatggatggggctctctgtttaaggaggataaattggaggaggccaatacgaaatggttaggaatctctctttctttctaacaattacggtcaaagttttggttttcaaggcatactcagcgactctgcccgaggctcttgcatctcctttcggctctaaaacaaagagccttaactggttgatagtgttatcgcaatggttggtttgccttttcatgaagatttggggaagctgagatgttgccaggagaagtaagcacaaaccaatagttgagagatataaacataaacagcaaaagagagactcataagcatcaggtccttgacgtctcctttcttcttctctggcttcagattcttcccaatcttcccagcctctgaaatcatccttctcaatgttctctggatcactccttcattctcttctggtaatttctgcttccgacaagacatcactctcatagatctaactccgtgtctgcttgaggcttgtctctttgtacggtggttagtgcagagt

SEQ ID NO: 292 - DNA, 968 bp, Arabidopsis thaliana
ggtcgcggccgaggtacttcatgggggagctcaccgtgcgaagcaggtggtgaaagttctgaacagcgacgggaaagtcattgcttatgctaagccgtcttatccatggataaaaggaagtgacacatcaactgcagaatcaggttctgaagctgaagatattgttgtgtctccaaaagcagtaaagagttattcccatctccgcttgacccctgttcgtgaagaggcaaaggttggttctggtgaaacgagttttgccggtagttttgcaggttatgatgagtatgttccaatggttgacaaagctgttgacgccacctggaaggttaaacccaccgccatcaaccgggctccttctaaaggagctcatatgcctccaaatgtcccaaaggatcatgaaagcttcagtgctcgtgtcctagtaactttcatggcttttgtgatggcgattctcacattcttccgtacagtatcaaaccgtgttgtgaccaagcagcttccaccgcctcctagccaaccgcaaattgaaggaagcgctgctgcagaggaagctgatctcctcaattcagtgctgaagaaattaaccgaacttgaggagaaaattggagcgctccagtcaaagccatctgagatgccttatgagaaagaggaactgcttaatgcagctgtctgccgtgtagacgcccttgaagctgagctcatagccactaagaaggctctttatgaagctctgatgagacaagaagaattactcgcttacattgaccgtcaagaggcagctcagcaccagaagaagaataagaggaagcaaatgttctgtttctagaagatgaagaagaagaatcaaatgtttgtttctagaagaagaagaagaagaagaggcatctctgctttctctctctcccttgtaggtttccattgaaacagaacaactctcatctcattttatgttaaaagctaatcagttc

SEQ ID NO: 293 - DNA, 968 bp, Arabidopsis thaliana
ttttttttttttttttttttttttttttttttttttttttttttttttttagataaatagtttttgccaaagatactctcaagagcatacacacacactcacataactgaaagaaaacagaggatacaacagaaagaaagtactgagaaattgggcaatgagaaagccgcttatttaatcttagcattattactgtgactgaagcaaaaccatattttccttttagaaatttctcactgaaccttctcggaagctggcctcttggtgatttcagccacccactcattgacacgtggacgctcggtgaagagcttcttggtgggagttccgagcaggtattgaatcgcgggaatgtggtgaagatcagtcaaagtgaaagtttcaccagccaaatacttgaactccttgagcctagcctcgtagacatcaaggaccttggctaacttagcctcctcttctgcaacaacggcttcgtctgtggtcaagccgtagatggacttgaatatttgttcaaaagcaagctttgaagccactgggtcgaactggtgatcttctacttgcattccaatggccatgattgcgtactgagatatgttcttggagtcggtttggagaaggttggttccttggttttcatatcggtgagctatgtactgagtaatcgctcttgattcgaagagcttgaggtctccatcttcaaaggctggaacctgaccaaaagggttgcgggagaggaaaggctccttcttgtgctcaccgtctttgagttcgacatgaacgagctcaaagtcgaggtttttctcgtggagggcgatgaggactctcctggtggcaatggaagctgggtgtccgaaaactttgatacctgccattgatttggttactaagaaactctttgaagactgagaaaaaagagagaaaagaggaagaaatgtgatgtttgacctgcccgggcggccgctcgaggt

SEQ ID NO: 294 - DNA, 967 bp, Arabidopsis thaliana
ccacgcgtccgcaataagaaagaaagaaaaagaaaaccagagatggcgatgacgacagcatctacggtatttgttctaccggccaatgtcacctcggtcgccggcgcttcgtcgtccaggagctccgtgtctttcttgccgatgagaaacgccggttctaggctcgtagtcagggcagccgaagatcctgctccggcttcctcttcttcaaaagattctccggcagctgccgctgctccggatggagctactgccaccaaacccaagccaccaccgattggtcctaagagagggtctaaggtcagctaacctaaaccgtcttaaattccattagcttgtatatatatacgcataagccaaagttacttatcgatggatgcattcataatcagttaatcgctatgcaaaaattgtataattagtgacaaaaaattaaatttcaccacatcttatgttcataacatggttcaaatctaattgcatgtttatgtgtgtgtgacttgtaaccacatattttgttcataatcaatcgtttcttatcttgatataaattgttgggattcgtaggtcaagattctaaggagagaatcctattggttcaagaacgttggatcagttgttgccgttgatcaggtaacgcatttagtctccaatcaacgatctaacggtcgtatgaatatctttcaccatgccggttttgtttagtttcttgaccagggttataaattgtgcaggaccctaagactcgatacccggttgtggtccggttcgcaaaagtcaattacgccaacatatcgaccaacaactatgcattggatgaggtcgaagaagttgcagcttaaatgggagaattcaaaaactctgtgtattctataccggtttatccgtttgtaacttgacccaaaccgtatgtaccgcaaaagtttaccaattatttctcctcatctgaaaaaaaaaaaaaaaaaag

SEQ ID NO: 295 - DNA, 967 bp, Arabidopsis thaliana
  misc_feature (1)...(967): n = A,T,C or G
agcggccgcccgggcaggtgatttcactcgaagactggttgttgtgtaattgtgttcgtcgtctcaggttttcaatatctgtctctttgagttgtattgatgggttctgaaggaccaacgggtgtgacgattcatatcacagggttcaagaagttccatggagtagctgagaatcctacagagaaaatggctaacaatttgaaagaatatttggctaagaattgtgtttcgaaagatgtgaatcttggaagttgtactgtgcttgagactgctggtcaaggagctcttgcttctctctatcagttgctacaatccgcggttaacacaaaagagtcagagtcgttgaccggaaaaaccatatgggttcactttggagttaatagtggcgctacaaaatttgcaattgagcaacaagctgtgaatgaagcgacttttcgttgtcctgatgaattgggttggaaacctnnnntttttgttcactcccctttggttgtttttgtttgataagttgtttagttccatgaaacattcttgtggtctgcagaatttgccaattgttccctctgatggtccaatctcaactgtaagaaagactaatcttnntgttgaagagataacaaaggcgttggagaagaatggctttgaagtgataacatcagatgatgcaggtcgatttgtgtgtaactatgtctattaccattctctgagatttgcagagcagaataagaccagatcactctttgttcacgttcctcttttcgttgccgtggatgaagaaacccaaatgagattcactgtttctctgctggaggtactcgcttctatttgcaagtaatgttatcccaaatgtggctattcttattcatgaaatgtgcatcatggaccgattgtctccccacgggaaaaattcgcttatcaataaatggaatataagttcacttaaaaaaaaaaaaaaaaaaaaaaaaaa

SEQ ID NO: 296 - DNA, 967 bp, Arabidopsis thaliana
gagttaagccttgaagacgaagagataacgaattggttgttgatcactcgctttataaatctctcagtttcttgctcacaccaacatctctctaagcttcttcttctaccaatctaattcctctcttcagcttcttgtgttgtgacgcatactcgtcgcagtcttgagatatggccgccgcagtttccaccgtcggtgccatcaacagagctccgttgagcttgaacgggtcaggatcaggagctgtatcagccccagcttcaaccttcttgggaaagaaagttgtaactgtgtcgagattcgcacagagcaacaagaagagcaacggatcattcaaggtgttggctgtgaaagaagacaaacaaaccgatggagacagatggagaggtcttgcctacgacacttctgatgatcaacaagacatcaccagaggcaagggtatggttgactctgtcttccaagctcctatgggaaccggaactcaccacgctgtccttagctcatacgaatacgttagccaaggccttaggcagtacaacttggacaacatgatggatgggttttacattgctcctgctttcatggacaagcttgttgttcacatcaccaagaacttcttgactctgcctaacatcaaggttccacttattttgggtatatggggaggcaaaggtcaaggtaaatccttccagtgtgagcttgtcatggccaagatgggtatcaacccaatcatgatgagtgctggagagcttgagagtggaaacgcaggagaacccgcaaagcttatccgtcagaggtaccgtgaggcagctgacttgatcaagaagggaaagatgtgttgtctcttcatcaacgatcttgacgctggtgcgggtcgtatgggtggtactactcagtacactgtcaacaaccagatggttaacgcaacactcatgaacattgctgataacccaaccaacgtccagct

SEQ ID NO: 297 - DNA, 965 bp, Arabidopsis thaliana
  misc_feature (1)...(965): n = A,T,C or G
ggacttttgttgtctctactccttttaatcattcacacaacagagtccatatcagactatgaagtgaagtcaaacgttaacgtagaagctttaaccgtagaggagcaaaagcaatcaaacagaggaagacgcagcagtggtagcagtcgtaatcgcggacgcagaagctgcgatcctctgtatcaatacttgttcgacacctgtggtcattggccttttcctacaactccttcgccggaaaacccttttctaccattccaaccaccgcgtccaccaccacgtccgagaccgcgtccaaggccatccccacgtctaccgccacctttggttccatcacccccaccaccactgcatccaaggccgtccccatgcccaccaccgcttatgccgtctccaccgcctttggttccatcaccaccaccacctcctccttcaccnnncgttccttcacctcctcctccctctccgccaccatttttcttcttcccttcaccgcccccgncggtgatagtgtttccgccccctttggtgccgtctcctccgccgccactaccaggtggtgatcagacgacacaacctccgccgttatggctacctccgccaccatttggagacgaaacgccgccagtgttctctcttccaccgccgttggatgagtttccacctatgccaccaataacatggttgcctcctccggatgttcccgcccaaacctcgtccgcagaggcctttgatcagattcctccactgttcatggaatcccctctgctcaaacgctaatcattttctgatttctcttttctttgtttctgtttagcagctggtgtacgattactaaactacgtagatttaacgaaacaattttgtttgtttgtaaacaacgtagcaattttttttttctctaagtaaattgataaattcacttaaacggatttctttttgactttttgtcaaaaaaaaaaaaa

SEQ ID NO: 298 - DNA, 965 bp, Arabidopsis thaliana
  misc_feature (1)...(965): n = A,T,C or G
ccacgcgtccgagagttttaggtttttttttcttcttctcggaggtttgtagaatcaacaaaaatggtggaagaccacaagcacgaggaatcgatcttggagaagattgttgagaagatccatggccacggtgactcgtcttctctgtccgattccgacgacgataagaaatctacatcgtcttcgtcgtcgtccttcaagtcaaagatttaccgacttttcggaagggagaaacctgttcacaaggttctcggtggtggaaaacctgctgatatattcctttggaggaacaagaaggtatctggtggagtcttgggtgctgtaactgcgtcttgggtcttattcgagttattcgaataccatctcctcgcttttctctgtcactttgcgatttttgctcttgcagcattgttcttgtggtctaatgcttgtacattcatccacaagtcaactcctcacatcccggaagttcacatccctgaagatcctattcttcaacttgtttctggattaagganngaantcaatcgtggtttgannnnncttaggaacattgcatcaggaaaagatgtcaagaaatttatcctggtaattgctggcttgtgggttttgtccannnttggcagctgctacaacttcttgacattgttctacactgctactgtccttctcttcaccattcctgtactctacgagaagtatgaggacaaagtagatgcctatggggagaaggcgatgagggagatcaaaaagcaatatgcagtacttgatgagaaggtattgcgtaaggtcataagcaagattccaagaggagctctgaacaagaagaaggattaaggaatgtgagttactctctcattggaatcgtagtaatggttcaagacatgttttgttagaagctgttggttgataaaccctttgatctcttgttattattatgttcattataaatttgggggttttaa

SEQ ID NO: 299 - DNA, 965 bp, Arabidopsis thaliana
  misc_feature (1)...(965): n = A,T,C or G
aagaaatggagactggtgctggtataggtttgtaccctttgcatcgctgcaaaaccatttacctagtgagacatgctcaggggattcacaatgtggatggggagaagaattataaggcttacatgtctcatgactactttgatgctgagttgacccagcttggctggaaacaggtagatagtttgcgtaagcatgttcattccagtggacttcacaagaagatcgaactggtcatttcgtctccactgatgagaaccttgcaaactgctgttggtgtttttggtggagagggctacacggatatgagtgatgtactacctctaatggtagcaaatgcaggaaatagcagccgtgcagctatatcgagtttaaactgcccaccagttattacagaggagtcctgcagagagcatttgggagtgcatccatgtgatcagaggagaagtatcagcgactatcagtttcttttccctgcagttgacttttcactgatagaaagcgaggaagacaagttatggaaggctgatgttagagaaacgattgaagaacttgcagctagaggaaaaaagttcctgaactggctatggacacggaaagaaaaagagatagctattgtgacacacagtggtttcttgtnncacacattgaatgcactacaaaacgagtgtcatccagatgttaagaaggaaatttgcggccactttgctaattgtgagctacgttcaatggtcatcgtcgatagaagtatgttgggatcggacagttcggtgactgattatccaggaaagattccaaaggggattgatcttccaagtgatgctgttgtagatgataacaacatcaaagttgagtgattctttatgatggacactgcattgtcttcaacttttctatttatctatacacaaacaccttctttgctgtatgcaactctcttattagtattactattgactatcgagtta

SEQ ID NO: 300 - DNA, 965 bp, Arabidopsis thaliana
  misc_feature (1)...(965): n = A,T,C or G
tctagtcaactcgagatcagactctgtggaagaggcagattctgctgctgtagctatcacaacaacagatcttgtaagcaagagtgttgcagttgaatcacaggttggtggaatcaaaattcgagttggtggtatggctaaaggctccgggatgatccatcccaatatggcaactatgttaggtgtcatcacaacagatgcactagttgaaagtgatatctggagaaagatggtaaaggttgcagttaaccgaagtttcaaccagatcactgtatatggagacacgagtactaacgacacagtcattgctttagctagcgggctatctggatcaccttctatatcatctttgaactgtaaagaagctgcacagcttcaggcatgcctcgatgcggtgatgcaaggacttgctaaatcaatagcttgggatggtgaaggtgctacatgtctcatcgaggtaactgttaaaggaacagaaactgaagcagaagcagcgaaaattgcacgctctgtggcttcctcttccctggtcaaagcagctgtttatgggagagatccaaactggggacgcatagctgcagctgctggctatgccggggtttcttttcagatggataagctgaagatatccctcggcgagttctcactcatggagagtggtcaacctcttccgtttgacagggatggagcaagtaactacctcaagaaaaccggtgaggttcacggaacagnnncaatcgatatatccgtaggtgatggtgcagccatcggaaaggcatggggatgcgatcttagctatgactatgtcaagatcaacgctgagtacacctcatagaactgagaccgagagacagagtttcatttactgtttttgtgttatatctcaaattataaactgaatttggttcaaataagcggacaacgtttcaacaataaagttccattgacttattctcaaaaaaaaa

SEQ ID NO: 301 - DNA, 965 bp, Arabidopsis thaliana
  misc_feature (1)...(965): n = A,T,C or G
cacacattggtttacttcaagactgatatgcttcattccatagaaagaaagaaaaaccattacataaatttagcaatgagataattgcagagaatgtctcatctaatagtatcgactacaacaacagcaacaacaaacacgttcaaagcaaaactcagagaataaactaatcccagttttgctcctaccaaaagaatctacacatggacttagattctccagtctcaatgtgcttcttcttcttcttcatcttctttcttgggttacaataacaaacccttcccaagcttatttacatataaatcacaactctgcaaattgttgaacggcgtgctgcgtccctttgtacaacttccaccgtgataaaataaggagctagaaaaataccaacttcttctgttgtcttcataaaacatactaataccatcagaaacctgtaagaatgcgtaagtaaccacctttacagtcttttgattgctgttgcgtctgctttcatttaagcacaaacggcttccaccgcgagtttcttcatcacatttggacacggatctccaccaaacatctccggtgctacagttacagaacaccagttctgcccaacacatagtttgttgaaagcgtcataggagtgatgggcatgacagcttccttgacggtaactaccacaagtcccttcaggtgtcccgaaactagcaaacttcacggtggtgatcttttgtccgggcccgcattgcaaatgcactttgggatgcaatggtttattaacttttccagaagcatgcaattggtagttcaccagcgttgattgccattcatagatatctgcacatacactgtccacttctcttctgaccaacgagatcncgttcgggtctcctccccactcctcaaagacaaccaatagattgccacttggttttagccacgaccttgggacatggtacctgcccgggcggccgctcgat

SEQ ID NO: 302 - DNA, 963 bp, Arabidopsis thaliana
  misc_feature (1)...(963): n = A,T,C or G
ctttttttttttttttgaaataagatttgcgtccatatcgaaactcgaattaacagtagctacacacacaaaataatggacgaagtttttttcagataaaccggttaagaaactcatcaacactagtgtacttgacttcagggtaaagctcggaagcctcaactccaaaagaaggatctatagtgaaggaggtaaagtcactcttcacaaggattgtatggatcagacccaccaaaaaatccattggaggcttactctcttggatggttttgaggagttcttcctctgaaacataagtcttttcgagagtcttaccgatcttttcctcccacaaaccaaccatatcgttctgcgatacaatgtaattgggcgggtgaatgtagagaatcttgttaagtgttctcggatcatcaacagctttcaatgtatatgcaacgatgtcttcttcagtgttgacaatggctttgnnttgccagtatcatagatnnnnnctttgtctctannaggagatctgagtcgcaagtggcattgacccaaacaaggaacaaaaagacctgcaaagcaacctgagacgacatacgtataaggtatctttgcagcttcaatggcacgccttatctgagctttagtgatgaactctgatagcgttggctcaatggctaccgtacgatccacgtcattaccaaattccnacggtaagaatctcttaacatttccagattctttgatggcatcgatgatattggtttgattaagaatttcagtttnnaaccgaccaacagctgatatcacgacatcgacttgtttaatcgccttcactaagctctctttatcacttaaacttccgtagagtatggtaacgccgagatctttgaatctctcaacgagttgggccttaacgggatcggagagagaggcttctctaaccagagcgaaagtggcgtggccagacttggcgctttc

SEQ ID NO: 303 - DNA, 963 bp, Arabidopsis thaliana
  misc_feature (1)...(963): n = A,T,C or G
ttttttttttgaaacaacgtttgtgtctaagaatctcaagcgtaataaccacagagagagttagactcaaatccaggtgagagaccttattgaacgccaaaccaaaacagcagcaagggaacgatcttctctttcaaagacaatcaagtgagagatctttgccttttcttacaacaaatcaaatgtttctaaggatcaaaccttagatgaagttacggatgtctagagacttcacgtccggcatttcctcatcctggaattcctccttctttttctgagattccatagcttcaacagcatcactcttcagctcatccaactgtgctttggccatgctgagctccaaattttcttcgtacttaggaagatcttctttcctaatcccaagctttttgttgcctttctcaaactctgcaaccaaaagatccattcctttcttgtcacttctcaggagaggcttctttatgtccttctcgactttctccaaagcctcgaacatcatggcctcagcaccaagctcatcagtaagccccctcctggtgcgaatntcctgcaacttcaacaagtatgcacgagcatctggaatgtcttgagtctcagtatcaatgtcatgtttaatgcgctgagattctgagaacatgtctgccttttgcctgatggtcttcattacatttgcatactgttttacggcagctgggtcctctggatcaagggtgatcttttccttacggagaatatcaacagcagcctggaatttgttcttgatatcaaaaaagacacccttcaacatctcatctcctttaaaggttggacgagcagcttccttagcaaaagctcggactggaatagcatgttgctgctgcaaaatgaccagacccccctgtagctgcttagatctggagagaaaacgagaagcgtacgccatttccttgatcgaatcgagtcgctgtggagttgacgaaa

SEQ ID NO: 304 - DNA, 962 bp, Arabidopsis thaliana
  misc_feature (1)...(962): n = A,T,C or G
tttttaataataaacgaatttttttattaacgttcttcttttttgaagaatcatataatccaacaaagaaaaatcaaaattataaaaccaataaatgatcgccacgtgccacttcaacaacctcgcacttcaccgtcaaccccttatccattccaccaccggcggccaccgttctcctcttcttcggagctccgttctcgttagaagaaggaaaagaagatctcttggacttaatccgaaccgggtcgggttctcctgaattaactctcaacggaaaattcaacaaagcgcgggaaccacgcatcctgaaagcagctctgtcgtaagccaacgccgcgtcctccgccgtctcaaacgtccctaaccaaaccctagctccgttcttcgccgggtctctaatctccgccgcaaatttcccccacggcctttgtctcactcctctataatgctttcccttcgccgccgtcaccgccgccgaaacaggactnnncntcnnnnnnttgaccggaacagaatccaccgccgcgaaactctccggagtctcgatcttaacactcgggaaagagctacgatcttcgtcggaagacgaagaagacggctcccaaccgccgtgaaaggcgtcgttgaggataccgtaaactaacatatcctcagaatcgttttctttcaacggcaaatctccccagctctcggtgaagcaaggatacagtttgctaaagctagggtttcgtccgtacaccggtttaatgctctgaccggttacacaagattgagtaaccgaactcgctgtcgactcactgagtatcggctccgattctcctagtaagtgtcgtcgtatggactcaagaaaagcataatcagattgagaatccgccgtcatcgacataacagaaagagaattattaagaatgtttttttgttgtttggtttggttcttgttgagatttcaaaacggacgcgtg

SEQ ID NO: 305 - DNA, 962 bp, Arabidopsis thaliana
ttttgaaacagaaaatgatgaactttatttagttggatcttcaatatccaagatcaacatcaacaatactgtgattatattatacatcaacaatagaacaatataaacacaaacttattactcttacatctttctttttataatcttttgctcccgagatttttggtaaagtgtcagtcttccttcatcaatccactgaaactggcttcatctcctctgcttctttcctcagctcatcaaacagaacagacgacagatatctttctccgaagctcgcatgaattgtcacaatgagtttgcctttattctctggcattttcgccagtctaattgctgccacggtgttagctcccgacgatatcccaaccatgagaccttctttcaatgccaattctctagccatctttatagcatcctcactactaacctcaagaacactctccataacatccatatccaagatttctggtttgaatccaacaccattgcctgtgatagcatgtggacctggtttgccaccgttgagtatgttgctttcagcaggctccactccatatatcttgacattggggtttttagatttaaggtatcggccaacaccagagactgtgcctccactgccaattcccatcacaaatatatcaacatttccaagtgtatcttcccaaatctcaggaccagttgtatcaaaatgaatctgagtgtttgcaggattagcaaactgttgacacatgaaagcatcaggagtactatcaaggaggtcataagctttcttaacagttccacccattcctttggctggatcagtgagaacaagctcagcaccaaaggatctcatcgtgactctcctctccaagctagtgtacgaaggcatcgtcattataatcctgtaccctttcatagcagccatgaaagccaaactgattcccatgtttcctgaagtaggctctatcagtgttgtt

SEQ ID NO: 306 - DNA, 962 bp, Arabidopsis thaliana
  misc_feature (1)...(962): n = A,T,C or G
gggacattaatgctgtctcatccagaagtagaatggatttggtggatggatagtgatgctttgttcactgatatactgtttgagatcccgttgcctcggtacgaaaatcataatctggtgatacacggttatccagacttgctgttcaaccaaaaatcatgggttgcattgaacacgggtatctttctgttgagaaattgtcagtggtcattggatttattagatgcttgggccccaatgggaccaaaagggaagatccgtgacgaaactgggaagatactgacacctatctgaaaggcaggccagcatttgaggccgatgatcaatcggcgttgatatatctcttgctttcgcagnnnnaaaaatggatagagaaggtttatgtggagaatcaatactacttgcacgggttttgggnnggtttggttgacaggtatgaagagatgatagagaagtatcatccaggattgggcgatgagagatggccctttgtgacacattttgtagggngcaaaccgtgtggcagctatgctgattacgcagtcgatagatgcttcaagagcatggagagggcttttaattttgcagataatcaagtgctgaagctgtatgggtttagccacaggggactgttgagtcccaagattaaaaggatcagaaatgagacagtctctcctctggagtcagtagacaagtttgatattcgaagaatgcacatggaaaccaaaccatagagctaggaaaatcaatgagtgaacggaatcacagtttggcaagattacaggaaacatatagatgatatacaaatactctcacaaacacaatgcaatttgtttaccctgcacttgttccttgtgcttcattgtttggtctcatgaagataagttttaactgtcaaattcttattccatagatgtttcttgtcattgttggtcaatatatggagaaatttgatactgcaa

SEQ ID NO: 307 - DNA, 962 bp, Arabidopsis thaliana
  misc_feature (1)...(962): n = A,T,C or G
ctttttttttttttttttttttttttttttttttttttttttttttttttttttttttttttctcactataaagacttatagaagcataagattcatagaccaaacaattcaaacagagcagcggggaaaacaaaatacaaaaaggctcggaggtctactatgagaaaagcttcgagatcaatctgaatcagagtcgacattcgctgaagacctaacggaccgacgtatgctttcttgatactcgtaatcttcctcatcttcctcttttctcttttcactaagcattcctttcttgaccagaagattctccagcttcgtcgtggagaaatcgtccttggcacctagatcttgaaacccgacaagcctatccatcgcgattcccttgctaaaaagggtaacacacggcaaagtcttgattgcaagcttggtgacgaagaagggagcgttctcagcgtccatcttaatgaactttgtgtccacatgtctaggagcaagggtcttcaaatgcttgtccattatcttgcagcgatagaactccttgtggtagaagtgacatataactttttcactccttgtgacttctcccaagaagtcgccttcgctaacttctcggtattcaccatgtccttgtcttttgaatgcttctctcttttccacttctctcnngagtgctgcaatcctatctgcgtgcaacttttctagcnnnggatcatccatcaattcgtcaagatcaacttcctcgttgacaggtcttgatccttgtgccttttcatttgcaagaacttcctttttataatctctagcagctgccgccaatacattcccgaatgccagattcgagagggtcgacttcaccgtatccggatccatctctttaccaacnnnctaatccaactcagaaaattttaaaatctcaatcaaaaatccctctaagatagccagagaagagacggacgcgtgg

SEQ ID NO: 308 - DNA, 961 bp, Arabidopsis thaliana
  misc_feature (1)...(961): n = A,T,C or G
ttttttttttatagcagagagaggttcatacttcattctatacaataatacaaacattgaattacattaaagcgaannntacacaatgtcacaatcatacattttnnngttttgtcatcatatctccatagacacttcttttcttctctatgatacgaaacacgtctgcaccattgaacttaaacaacaacaataaacacagtccactcgctgtaatcgaataatcacagtggcttgaaccgcggatcttgcaaaatggagcactaaactgnnataaaaaccagactaaccagtaatgtgatgtgatgatcaaggcttcggaaaggaacaatcgctgtagacttgttatgctttgatcttaaatacaatgttgcgacagtggttcttcgggtgtatgggttagcgtaaaggatggttatatttctcttgtactccagtttctcctctttgtgttgcttataatcacaaagngtntcttttgctttcaagcattgcaccgtcttttagagcagtgtgtgcttcgttctcttgtcctagagctgacaaagctacagcttggagatacgatgcgatatgccaagcaggagatatgacttgtgcttgcattgcattgtttagtgcttctctaggcatatcattcattaggtaacacagactctgtcttgcatgaacagttggggaacccattgtacctacctcgatgaactgagaatagcattcgatggcctttgcaaagtctttatgtcggaatgcagaatccccctttttcttgaagannnatgtgtcctgcatctggtcggtccacatctggaaagaaagctctgtggttgcaccctcgtcatccttatatccaagcttctcaatgatctcatgtatggcagttagatctgatcttaggcatgcttcgccaagaggtgaaagagctgtcgttgtggcactgttaggtacgcccaacaattga

SEQ ID NO: 309 - DNA, 961 bp, Arabidopsis thaliana
  misc_feature (1)...(961): n = A,T,C or G
ttaaaaatgacaaggagtcaccggtttagttaccggttactccttctccttctactaatcttccaaacggcacaacgtttaaccaccgccgatccaaacgacgaagcgtgtttgaaaaacctccggcaaaacttagaagatccggcgagtaatctccgtaactggacaaactccgtcttctcaaatccatgctccggcttcacctcatacctccccggagctagctgtaacaacggaagaatctacaaactctcactcacaaacctctctctccgcggctcaatctcaccgtttctatcaaactgtacaaatctccaatccctagatctatcatcaaaccagatctccggcgtaatcccaccggagattcagtatctcgttaacctcgccgtactaaacctctcatcgaatcatctctccggcgaaatcactccgcagctcgctctttgcgcttacttaaacgtaatcgatctccacgataacgaattatccggtcagattccgcagcaattaggtctattagcgaggctctcggcgtttgatgtgtcgaataacaaactttccggtcagattccgacgtatttgtcgaataggactgggaatttcccgaggtttaacgcgagttcgtttatagnnnntaaaggattgtatggttatccgttgcaggagatgatgatgaagagtaaaggtttgtctgtgatggccattgttgggattggacttgggagtggaatcgcgagcttgatgattagttttactggtgtttgtttatggttgaggattactgagaagaagattgttgaagaagaaggtaagattagtcaatctatgcctgattactaaacgtaagattaaatttttcttaattaaggattttgattgttaattacggctttgaagaagattcttgatactgtatgtggttctattcttttatatttatgtttcagttctgttttca

SEQ ID NO: 310 - DNA, 961 bp, Arabidopsis thaliana
ctttttttaattttttttaacggttttgtaatgataactaattgagacagaaacttataacgaacctgttgtacaactaaatactgatcatgtctttcacatggaaaggataatgtacacgcaagaggatgttatatacacatgactgatatagagagaagtttccgaatataaagtatacaacgtaatgtactaatagggatgtttctttaatcggttgcttcgagtgaagtaatccctaaaaactggttactttgttccgtggagaaaacaagccttaatactgtacattctgtttcttccataaccgcgccagacctgtacacttagtttacctttgatggtgagttagagttcccaactactagttttagtggggattcaagaggactcttctgcagcattcttggagttaccgttctccctcggattttcgataagatccattgtgtaagaccaatctgaatcaggcgcggttatgttccaaatgcttgaaaacagttgctcgtgatcattggcgtcttgaccatcatcatggtaggagacttctggaaacaattgcttttgttccttcatagaacttggagtctgcatgtatgacgcaagggcagactttccttggatctctgcatatgccaatgaagcaactttcccactgttgaatttctcccatattttaccattgaaagtctgttggaagggaacgatgtgcaatggagagaccatgttgataaaagcgtgacccatgttgcatttattctgtatccagaaaaaagcttaaagtctgtcggcaagcatagaaagtcatagtctcccttgtgcttttcgtcgatttcagccaccagcatcttgtaagtgtacttgtttgggatgtttttgatgattaatgtagttcggatttcatctccactagcaatcctatccaagtcgatatgatatctcccaccatctatgaactgat

SEQ ID NO: 311 - DNA, 960 bp, Arabidopsis thaliana
ttttttttagtaataatcctaacaacttttcttatctcaaaaagaaaagaatcgaaatgaagccaaaatcagctaattgtttcataaacaaagtcacaaacatatatctacgcagtctctctgtctgtctttgagttggctcatagactgtgtaatgaaacttttaccttcaaaagtttctgatgttcgatggatgcactctgcaacggtttagcctgttaaaggaaaggagtatccacgaaggtacttggagtccactcccgattcacgagccaatgccacacgaccggttcttgcaacctcacatataccatagggctccaataacctttgcagtgcaaccatcttgtctagatccccagtaagctgcaaagtaattgtgtgatcagatacgtcaacagctttagccctgaaaatactagcaatgtccaggacatctcttctagcagcagcgttcacggcaatcttaatcagcatcagttctctttcagaaaatggcaaatgagtaagatcatggacctcatgcacatctacgagtttgtaaagttgctgcaccaatttgctgaccgattcatctgttgcaggtataactgttgtaatgcgtgaaatgcccttggtttcagcatgtcctacggccaagctctggatattgtatccccttcgagcgaaaacaccagtcacaatattaagaactcctggaatatcatttacaagcaatgatagagtatgcgaccgtagtccactcgtatcttcgtcagtgagaagtccccagtgagcgtcgagaatacgatgtaccttggggtcaaaaaatggctcaacgggataaacatctccccctgctgatgtttccttttgagggacaatggctccttttttgctacttcgaagaacactaacaggcgcttgctccttgagatctggataggatgctgctgaaaatcgccaaaatggagcagttgc

SEQ ID NO: 312 - DNA, 960 bp, Arabidopsis thaliana
tttttttttttttttttttttttttttaacggtgtgaccaactcaggatcttaattgaaaaaactcacatacaatgtaacaattttgacaggttttgaagaattacaaggcacacaaaacagagaagacaagaatcaattaaagagaaaaaaagatgaagaaacaggttttggtgttttagtcaaggagtagtcctaagtctttttttagccagttcctccaagaacaccctttagcttcttgactgtagtggcgtcaaggaaagtagtacccacgacgagttcagtgggaagactgttagcaaagagtgcgaagtcgagaatctgcagacccggattagcgctgttgaaagtgacaacggctgaagcagaggattttcccgcgttgatctggaaatgaagcaagccctgtgggaaaaccatgacctgtcctggtttgagtgtctgcacgtagacagcgtttgccgaggagacaaacccagcggtaatggagccagtaaggacaaagagaacctcagaggcaccagggtgagtgtgcattgggatcacacctttaggagctaagtcaagtctagctgtagagaggcctagaccgttcagacccgggaactgagctgcgaaagcgggtgtgacagcggcgttgatgatgtttgtagtgtttccaggagtgcctaagccagagaagacaaagtctgtagctttgacatgaatgggacgaatgcaagggtaacccgcaggggtttcagcgcgtttcaggtttgcgacacagaaatcttgaacagaggcattggatagagcaaagagaagagataagaggaagatagtacgcaacattttgaatggttggtttaagaggaagatagtactctacttttcttttctttttccctactcttctcactcctctcggtctcgggtgtttatatagagaggtgtgggataaactgtgtcggacgcgtgg

SEQ ID NO: 313 - DNA, 960 bp, Arabidopsis thaliana
gccgccctttttttttttttttttttttttttttttttacttcgaaaaaatcatcacaacttataatagaatttagaattcaactataataaaaaaaaagtatacatattgaaattcttaaaattcgttacaacatcacgaatctgtaatatttgctattcgtataagcaaaatgtacaattcacatcactaagacagattacttaacgaagacgtttagttaccttatttttcttcgtcgccgtttcacacactaacactacaactagtggtaaacgtatacttaacggcgttgtctccgacgataactccgttagctttgttaccgaagtttatatatgctggacacttcacatgaagatgatacttcccggtgataaaagtcccaaccttccacctcactctaccatcagcacgaatgatcaacaaaacgacaccgttatctttatcggtgtcaagactaacgccgttaaaaggagcgatgggaacggaggttccgtaaacaaacggcgaccagatgtcgacatctttgtgtccctgatacgtgggagggattgatgttgggaaagtgatttgttggctccggtaagtagcgtagacgtcaagccggtcgtagtaaatgccgattttgttgttagggttccgggaagagagagtgatttggaagttggaggtgaggaggttcggtggattgccggagacgttgaaggcgtagacggtggcgtcttggaggatgaagcgtggctttgatggttggagaattgcccaaatgaggaggattgttaggaagatgatgaagaggacgaagattattgaccaaaatattcgccttattagtttccggcgagagtggccgtggttttcacagtctttcatggtggttgttttttttctttctccgacggtgagtggtggtggtggggagaaggtggagaagttgttaagagatcggacgcgtgg

SEQ ID NO: 314 - DNA, 959 bp, Arabidopsis thaliana
atgcttgggattgtgagtccgcaagtgttacagtcgccaaatattgttcaggccccaagtcatatgacagggtcttcaattcaagatgcgcaattatctggtcaaaaccttttaccgccactggcacaaaggtcacagcagctaagtcgtgctccccatagtcagtatcctgtccagcaatcttctaaacaaccttttagtcagattccacaactagtagcacaaccaggtccttcttctgtgaatcctcctcctagatcccaagttaaagtcgaaaacgctccattccaacgccagcaagtggttccagcttccaccaacataggttatagtagtcagaattcagttccgaataatgctatccagccatctcaagtaccccaccaagcattaccaaattctgtgatgcagcaaggtgggcaaacggtatcattaaattttggcaaaagaataaacgagggtcctcctcatcaatcaatgaacagaccatcaaagatgatgaaagtggaggataggagaactacttcactccctggaggtcatgtgtctaattcaatgcttccgaatcaagcacaagctccccagacacatatctctcccgatgttcagtcaacattgctccagcaagtaatgaaccttacgccagaacagttgagattactgactccagagcaacaacaagaggtcttaaagctgcaacaagccctcaagcaagaccacatgatgcagccttcatagcattgaggggaaagcaacacggttggtcgatttcattgaatagatcaaaaaggatatttttccgcatacaaatcaccatagaaagaagaaggctctctcacctgaattgaggtgagtgattgtacgattagtgtagcatttatttgtgctgagtttgtcttatagaagaaacattcagccatcaaaatataaaagaaaggaaaagttataagttcaaaaaa

SEQ ID NO: 315 - DNA, 959 bp, Arabidopsis thaliana
  misc_feature (1)...(959): n = A,T,C or G
ccacgcgtccgggtttacaaagaaactattgacataggaaagaaaaagaagaacttaatgcttgttggtgatggcaaagacgcaacgatcataaccggtagtttgaatgtcattgatggatccaccaccttcagatcagccactgttgctgccaatggagacgggtttatggcacaagacatatggttccaaaacactgcagggccggcaaagcaccaggctgtggctctacgagtgagtgctgatcaaactgttataaatcgttgtcgcatagatgcgtatcaagacacgctctacactcacacgttgagacaattctaccgcgacagctacatcaccggtaccgtagatttcatcttcggaaactctgctgtggtattccagaactgcgacatcgtggcacgaaatcctggagctgggcaaaagaacatgttgacggctcaaggacgggaggatcagaaccagaacaccgccatttcgatccaaaaatgtaagataacggctagttcggatcttgctcctgtaaaaggatctgtgaaaacgttccttggtcgaccgtggaagttgtactcaagaacagtgatcatgcagtctttcattgacaaccacattgacccggctggttggttnccatgggatggtgagtttgcgctctccacattgtattatggagagtatgcaaataccggtcctggagcggatacgagtaagagagtgaattggaagggatttaaagttattaaagactcaaaagaggccgaacaattcannntggcgaagcttattcaaggaggattatggttgaaacccactggagttactttccaagagtggctttgattttaatgtctacttgttcttgtactttgtgttgtgttacctctgttttagtttgatgtattttttctgttttgttttgtatgacttacccaataaataacatgctctgtttcgcaaaa

SEQ ID NO: 316 - DNA, 958 bp, Arabidopsis thaliana
ctctctctctctctctgcaactaatcacttgttcgatctcgaagctgaagctaaagctttcgctaatttgcttaaggagctatgggagatagtcagtactcgttttctctcaccactttcagcccatctggtaagctggtgcagatagaacatgcccttacagctgttggatctggccaaacatctttagggattaaagcttctaatggagttgtcattgcaactgaaaagaagttgccttctattctggttgatgaagcatctgttcaaaaaattcagcatttgactcctaatattggagttgtttacagtggcatgggtcctgattttcgagttcttgttaggaagagtaggaaacaggctgagcaatatcttcgtctgtacaaagaacccatccctgttacccaacttgtaagggaaaccgctactgttatgcaagagtttactcaatcgggaggtgttaggcctttcggggtttccttgctggtggctggatatgatgacaagggtccacaattgtatcaggtggatccatctggctcttatttctcctggaaagcttcagccatggggaagaacgtttctaatgcaaaaaccttccttgagaaaaggtacacagaagacatggaacttgacgatgccattcacacagcgatactgacattgaaagaaggctttgagggagagatctcaagcaaaaatattgaaattggcaaaatcggtgctgacaaagttttcagggtactaacaccagcagagatcgatgattaccttgctgaagtcgagtaactcccagcatagtctagcaacaaagtttaagaccggaatttcgtggcatttacagtcttaaagagttgttttttctgtaaaactttggatctttaaatagtttgttgctgaacacaagctgagtgtctctcaataactaatgaaatctgtttctttttttctcaaaaaa

SEQ ID NO: 317 - DNA, 957 bp, Arabidopsis thaliana
  misc_feature (1)...(957): n = A,T,C or G
ttttagataaaacacaatattaccatacgtatccgcaaacaaaaagctaatcaagtaggcttgaaactacacaaacattcttagtaaggccaaatggtccaatgaggtaccacaagcccatatagggccatatatttctctttagtgatttacaagtaatcaggcacgtaagnnngtttccatagtcgtccaggaaaggcttcatcgtctgattcgctttcatcatcagaactctctatccccagcaaatagttgacaacctggtgagttgttatgaggtcgagtggcttgttgcctgatttcaaccgacattgtttgttcagacatctcaagttttcgtgccaaacaatagaatcacagtaactgcagtatccccggccagatctcaatgcctccgatgaattagccgcgatgtatgctttcttaaaggcttctctccagtcaatatcggactgcatacgaatcaagactttgtgattgaagtgaaggtcaaattgtgattgccacagagagttctcatgcgttgcttggttccaagagcgagacacttgagctgaggaaactaaggacgatatctcgaggaaactgaagatgtgaataaggatatcttgtggaagtgaaggtatatctatatcttcttcctcacggttcttactacgcctctttagtgctacttttgcctgcttgaattctacaatggctaaattcttcttctgtttggggagcaccgcttccacgctcttcaggagaaggttagcggctgaaacagcagctgatgtattgatgtcgggaagaagacgaaaagcggagagggtatcttggaagatcaaagctttgacatttttgggtgatagagagtaagcaagattcaatatggagcttagttcattgcaagcaaatgggtaaatacgatttttggagaaagcttctcctacctttagattttggtatctcttc

SEQ ID NO: 318 - DNA, 957 bp, Arabidopsis thaliana
tcagattcaatccttttgaaacatttcaatggaccaaggagtccaagaaccagattagggttttaggtattcaagatttttttaaagaaaacatagaaccggacaaccatcaacatcatagttaaggcgagtagaacatcataagccttctttgaaggacggtaccagatcatctctggcagaatgttaccgacttggtttgttttgtttctcatttcttcagagcttttacatgaaatcgtcttcaagttcttgaagcgatttgttgcttgaagcaatgtctttgttggatgtcattttatcagttaccattagtcccttgtaactcctcatctctgattgcctctccttctcaagcctatctatctcttcacgtttcttcttctccctcagatgttgtttcctctctgccctttctgcggcattcactgcttctctctcggctctcagatcaggggttctttcaacttttgttttgttcagtctgttaactatttcattgactcgcttctccactctgatagtccggaccatctttgaattgtggaaaccaacttgaccaacatccatggaggcagttttcttcaagttggaccacggagtgtacacaacatcaacgttgttcaccttgttgccttgaatggagttagctttcacaagctgagcacagtcctccagcacaccttcactaatgtcatcaaaactttggcctctatgaagcctcaagtaaacatgagctgacgacattttatccacgtgaaaccagacatcttcagggaagccgtacttgatgagctcctcgttctcgaacttatcaagccccatgaagatggtgtagtcgccagcatcaggacgggccttgaagtagaaaaccatcgcttcgattcgagaaacgaatcaaatcgaatggagatcgaatctagggtttccccctctctcacttctctatctcccttg

SEQ ID NO: 319 - DNA, 956 bp, Arabidopsis thaliana
agtcactgactttgctggtagcacaaacttcgttatacttgctgtgttaacacttgttctcaaagcctcttggcattttcgacagatagtattgactttgctagttgtggtatggggtcttcgcttggggattttccttctaatgaggatcttgcaatggggggaagatcgtcgctttgatgaacagcgtggaaatatagtgagactaatcattttctggactcttcaggctgtgtgggtttggacggttagcttacctttaacacttgttaatgcaagtgatggtggtggatctcttaaacccgcagatgttatcggttggactatgtgggttttcggtttcttgattgaagctgcagctgatcaacagaagctatcattcaaaaactctcctgaaaacagaggaaaatggtgtgatgttggagtctggaagtattcaagacatccaaactacttcggtgagatgttactgtggtggggaatctttgtggctgcatcgcctgtgcttgaaggtgcagagtatcttgtcatattcggaccactctttctcactttgctacttctattcgtcagcggcataccattactcgaggcatcggctgacaaaaaacatggaaactcaggagcttacagatcctacaagaagacaacaagtcctctgattctgttcccaagaggagtgtatgggaacttaccaggatggttcaagacggtctttctcttcgagtttccattttacagccgaaatctccctcaagaggtggctgtttagtaactgcttattctgtttcagtttcatcttttatatcttactttagtgtttgatgagtttggcttctctttgttgtatgtgtgcaagaaagttagggtagactccaaaacagcaaagagaaagaagtaaaagatgactgatttgtgatactcatatttgagttattgttcttcacaacactctt

SEQ ID NO: 320 - DNA, 956 bp, Arabidopsis thaliana
aaacaaaaatgagctcccaaatctgcagatctgcttccaaagcagccaaatctcttctctcttcagctaaaaatgctcgcttcttctctgaaggaagagccattggtgctgcggcagcggtttcggcgtcaggaaagattcctttgtatgcatctaactttgcaagatcatcaggttctggtgttgcttctaagagttggatcactggactcttagctcttcctgctgcagcttatatgattcaagatcaagaggttcttgctgctgagatggagcgaacgtttatcgctatcaagcctgatggagtgcaacgaggactgatatcagagatcatttctcgattcgaacgcaagggattcaagctagttggtatcaaagtcattgttccttctaaagatttcgcacaaaagcattaccatgatcttaaggaaagacctttcttcaatggtttgtgtgacttccttagctctggtcctgttattgccatggtctgggaaggagatggtgtgatcagatacggacgtaaactgattggagccactgatcctcagaaatctgagcctggaacaatccgaggagatcttgcagttactgttggcaggaacataatccatggaagtgatggaccagagactgcaaaggatgagatcagtctgtggtttaagcctcaagaacttgtttcttacactagtaactctgagaagtggctctatggtgacaactaaatccctcttcctcttgtcttttgaaatcaaatcacattggtttttcttttcttttcttacccatacaataaaaacaagaaacagttgttacggatacaaacacattccgggttttgatttttccccggtgaactcagtaatcagagcataagcaataagtatgggatgactagtatttgaatctatattgttcaattaaaaaaaaaaaaaaaaaaaaaaaaaaaaaaaaaa

SEQ ID NO: 321 - DNA, 955 bp, Arabidopsis thaliana
ctttttttttttttttagttaagatacaatcttattggtggtaataaataatgtacctttgttctaattaatacatttggtaagagaccaaatttcattaaattttataagccttgtaactcaaaatttctactttatgcttgaactaccctctgttcctcttgactcaacacctaacattgtcttcacttgaagatccacctgaaagaaacaccgttcgtcttctcggacataactcacacggccattcatctgctccaatagtttccgcgaaagcttaagccctaaaccatcaggggtgacccatccatctcgagtctcaaacatatcacttagcatctctgaaggaagtcctttccccggatgtatcatcctgaactgtagatggatatagcgaccattgtcacgtgaaagctcctgccctggtgagatactgatacctacccaactatttggaaacggcgcatgattcacaatgttgcgtagaagatcagcaagaataagctggagcttgactctgtcaccattgagaggcagagttttgatctcctcggcgacttcaacccttagttgtgagttcctctctctcaatataatcatcacttggctaatgattgtgtccaagatgttttcaagtcgaaactcttctgtttccaattgcaacttgccttcctcaatgcttttcaagtccgtgctttcgattattgtcgtgatttgcttctcacaagcatcactagtctccagaaactgcctttggctagctgaaatctctgaggattcaagaagcttatgtgcaaatcggataccgttgagaggattcttgatttcttgtcttacgtaagttaattcgttgaggctttgagcgctctctttcagttctgggcagctcaaccccgattctttattgataatctgcaagaagaagaaacatcttataacttttccttcgatgttt

SEQ ID NO: 322 - DNA, 955 bp, Arabidopsis thaliana
tgtattattgtacttaccaattcataaagctaagagaaagcctttcaatggaaagatgtacaaatacaaattaaataattaacaaacgcaccccaatcaatataagatgttgaccttataactttctatgttgccatattaaacccacattaagcaaactaaagaacgtcattacatcaataccatatttcatttgtttccccatcgagatgattagagatcacatgcatccgaaaagctttttgggagcggttccagtggcacggtacttggctgctaattcctctgctttgagaatttcttctccacgcttagcttcaatcatcgctctcttctcttctgcttccttgtgaatttgagctattttgttcttcatctgctccacatactctgcttttttcttctccaaatgctcctccattttcttgagctcagcttccacagctgctttcttgttgttctcccatgatccaattgaagaaagcttcttctcagctttgttctccactttgcatttctcagcctcttcccaagctttgataagtgacatcctcttctctgtctcaactctagccagaacagcatctcgattaactgatccttctttcttctcttcctctacttctttagggacgacgggaacaatagccttagagtcttcttgcttctcctctgccggtgccggagatggaagaacgggaggtggagccacaggcttctcctgaggagcaacatctgcagcagcagcaggtttctccaccggaacttccggtgttggagttggttccgacacggtctctgtcaccttcttcggttcctcttcagccatgatgttaggtacaacaactaaagattacaaagagaatcaaaatgattctgaactctctggttatttaagagagagagaaaacaaaaaattgttttagagagattaactgtttttattttgaagaaa

SEQ ID NO: 323 - DNA, 955 bp, Arabidopsis thaliana
  misc_feature (1)...(955): n = A,T,C or G
tgggatgacggtgcgaatgataatgtagcaaaggtttacatacgaggtgatcatgaaggcattcagtacatcaaattcgactatgtcaaggatggacaatcgtttaatggatcagtccatggtgtttcagccgacggtttcacacagacgtttgagattgaccatctccagtatgaacaaattgtatctgttgagggttactacgactggaagaccggtgtgatgcaagcactccaattcaaaaccaacctcaagacttcagaatttattggatatcaaaagggtactaagttttcacttggagtcgatggaaaagtcatcgttggcttccatggatctgcttggcgtagcctccgatctcttggtgcatatgtaaagactgctcctaccaaatcagaactccagggtggcataaccggaggcgaatattgggatgatggtcctaatttcgacggtgtaagaaaggtgtatgttacttttactgaaactcatataaggagtatgaacattgactatgaccaagatggccaagtggtgacacgttatcacgggatgaagaatggagaaacgcaggagtttgctgtggactttccgaatgaatatatgacatctgtggagggtacatacgaccatatcagtgagggtaactatttgnnncttacgtcattgactttcaaaacgtcaaaagggagaatcnnncagacatttggattggtcattggtaccaaatttgtgttggagactaaaggtaatgttatcagtgggttccatggaagagatggtggttcttttgatgctattggagtatatttctctccaatgatatcttcctaagctacagaagtttgttcatgcatggcttcacgtatcttttactactttaaaatacttatcgattccgatgttgtcaactatgaacatctatgtaacgaaataaaactttatccaaaactaa

SEQ ID NO: 324 - DNA, 955 bp, Arabidopsis thaliana
ctttttttttttttttttttttttttttccttgtaaaaagaaataaatttataattatttacaattccaactattgggtaatacacccagaataataattaaatcaataagaaaatcaaaccctaaaaagaaacttgggataaaagaaaacgaaaaaacagagatatcaatgttgtatcaactgagagagaagcttgagaagaaaagaaatctccttctgtgaaaactcaggtcttgtaatggcaacatcatcatccttggaaggtgatggtaatggtgatgatgatggtggtggtcttatcatcatgcgtgtcgtggactctataatctcctcaacaaaatctacaatcactccatcgatccccatcacatattgcatgtacactgcctctccgacattgttgagtttgccgtatgtgaggagagagaggttagattctttgatcttgctaatggctgctgggttcctgaacactccttttacctctgaaacaataccttgaagacctccttccaagcaaacttgaatggcttcttcgagcgagtttcttctctcgtcattgtgaatctcgtttcccgcatcagtcagaaagaaaacagggtaagtgctctgcagttccctaacaagcttagctgcatctggttggaaacttgagaagattactggtctgtctttagcataattagagaccacctgtagtactgatctcaggatatggacaagaaactctcgttcatagacggtctgatcatcaaatttcaactcgatattgaacccaagagtttgttcaacttgttcaaaagcttcttgcaacgtacaaagagaatcatccaaatcaacgtcccatttcaaaaccttcccttctttagatttcctcatcagtgtcttccctattttctcagtttccttctgaggtccataaaggagaaactcagacagactcagatccgtcac

SEQ ID NO: 325 - DNA, 955 bp, Arabidopsis thaliana
ctttttttttttttttttttaaacacacaaaaacaaacttcaatgtatgtgaaaaagggttaataagacacttatgatttgtttggggtttaattaagtggcaactgtttatttaccaatgcaaaacttagcaaaaatggaagataaaacctcttcagagacatcttgaccactgatttgagcaagagataaagcagcttctctaagctcgatcgtccagaaatcaatcggaatctcgtcttcgatagcttctctcagcctcactagcgcttctttcgtccgcaccaattgctcgcattgtctctgattcacagtccattgatgtcctccagtggggacacgatcaagaccaagaatctccaatattgcatcttcaagctcttcaattccttgaccagttacagcagaagtgaagacagacttatggaaaacttcttcctttttcctctgatcttctagttgatcacagctaccaggaggagcacagtcaattttgttcatcaccagaatcataggcttgtctgattggatcttacgtagaagctcagtgtcttcttcagtccagccttcgacagcactcacagccatgattatgacatcagcaaccttagcagctgtttctgatctttcaactcctattttttcgacaatgtcattggtttctctgataccagcagtgtcaagaagtgtgataggcacgccgcggactgtaacattagcttccacaacgtctcgagtagttccagcaacttctgtaacaatggctctctcacttttgctccaggcatttagaagacttgatttcccgacattgggacgtccaacaatagctatctgcaatccgctttgaagaagcttgtcatagtttgctgtatctaatgcactttctacgtcttgagacatgctggttattttgttaataactgactctatatccaatggtgcggacgcgtgg

SEQ ID NO: 326 - DNA, 955 bp, Arabidopsis thaliana
ttttttttctcaagaaagtttcaaaaaaatataagtggatatgttactgttacaaggagctaagacatgacagtctctcaaaatcagtttcagactaactaaggagaaggataaataaatctgttcaaacacagagaagatagaacaacattttgagacagtatatcaactatgctcacctcggtttacccccggtttagctcttctactctgggttcaagaatcgctttcggttgataaaccgttgggatttatgccgacttgatcaatggaatggaagcagtttcccctgtggctgcgtgctgccacttctcatcatcgcgcaaaattcttcaaagtttattcttccatcattgtcggtatcaacttcggatataacttctttgatgctagcttcatctcccattccatattccttcatggcactttccaactcatctctagttatgtgcccgctgttgtctttatcaaagtgttggaatgctttgtatacatgctcatctcgatctaatttgtatctatgcattgtcgcagagataaactcgtagtagtcgattgttccattaccatcgacgtcagcggcttccatgagttgcttaacttcagtttccgagagtctagacccaagtctagttagcccagttttgagttcttcataagtgattgtcccgcttttgtcggtatctatattcgcaaacatggttttaagacctttaatctcctcttctgatagactctccgcgataacctttagagctagcttcttaagcttgttcattgctcggaattgcttcatgcgggataacacagcgctatcaataggcttgtctggtgcttctccccctttgatccaaggatgttcaagaacctgtgcagccgtgattcgtctcttcgggtctttggttagcatcttcctaacaagatctttcgcgctttcagatatagaaggccatgg

SEQ ID NO: 327 - DNA, 954 bp, Arabidopsis thaliana
cttttttttttttttttttttttttttttttttttttttttttgagaaaaaaaaactctaaactgggattgtcctaaaagcatgaacacatattctcacttctacacatttggcaatgaaaaagccattctcttttgtgtgaaggaaaccctaaaatccatctttacaccattctctgcctttttatctctcactcatcagcctaaagagggatgtttcgttctatgtatagaaaaaccgtaagcaaactacacaattttacagatttagcagagaaaacaaagctctccttcacaatttccccgcagattatttccggtttagatcttacctaattctcaaaacgctacggcagccccatccaccctagttaagctgtacattacttaaggtcttaagccatctggggctgggttagggactgcaaagccattctcctctctccagcagcaacgagtttttcaatacgcgcaacgacatgctttccataagtgtacttttttaaagcagtaagatgcactttgatgcgagtaagtatcagctcacgttgttggtcatcacaggtctccaaaactttctgcactacatagtttgcgaactgatccttcatcatcgcctgaagaggctcgttttcatcagttgttcccagcatctcattcacaagcaattctcgttcctcaggacctccaaaagtcaaacatttctcaacaacgtttgatgcgaacttctgctggctcatctgaacaatcttccccgccaattctttgattatcacagtgcgctcatcaggctttccatgctccagcacatgctgaacaacatagtttccatactgatcttgggccagcatactaacagtggacaggatttcttccataaccttactctgtgtatcagggtcatggcagtgttccaatactctctgaataacacggcacccatatgggtgagtgg

SEQ ID NO: 328 - DNA, 952 bp, Arabidopsis thaliana
  misc_feature (1)...(952): n = A,T,C or G
tttgtagaaatcagataatcggtggaataaaaaaacaataatcagtgattttattaggtaacaatcacaataacataaagattannacttttgacataacaaacaaacaaaaagactagcctagccctgcgctttcgtcttggcgaggagcgtcttctttgatgcgcggtggtctaacaatcttatcaataagtccatactcgattgcttcctctgcattgaaccttttcacccggctcaagtctttgaagaccctttccgcaggctggcctgtattcttggctagttcattgaagaggtagtctcttatccttgaaagctcttttgcttcattttggatatcatcagcctgaccacgggctgcaccagctggtgactggagggcgattcttgataatggcatcgcaaatcggtgacccttttctccagccgcaagaagaaaacctgcnnggttgtaagcaagcccaacgcaatgtgtcccaaccggacttttcaagctcttcattgtatcatagatggctagacttggagtaagatcaccacccggaccatttaggtacatataaatcctcctcgagtcatcaagagtatcaaggtacaacatggttgctaatatctggttgctaaactcttcatcaatgttttgtccaatgaagattacacgctctcgataaagggcattccatatatcaacccattgccaagtcccttcttctcggtttctgtagggtactctcggtgttcctattggcatcatctttacccgtgacctgctcgctttcccagtcccagattgcagactcttataaactcttccatagaactccttgttcaaattctgatacccacttgccaaaaagcttgcagattgaggctttaacccagaataaagcttgatgctacagctcggactcagagaaggctggtgaagcgttgtattaaacgagaccgc

SEQ ID NO: 329 - DNA, 952 bp, Arabidopsis thaliana
  misc_feature (1)...(952): n = A,T,C or G
ccacgcgtccgggcgaatctggttcgagttagggttccaattgaaaagtttgaagctccttttgactctctctctcttctagatctcgacaactctaacctcttcgatttggtggatcttgagaaattgattttagttcaaagcttctgatggctaaaaaggagagacctagacctgagaagttgtctgtgtatctttatatacctaatattgttgggtatatgagagttctcttgaactgtgttgcttttgctgtgtgtttctccaacaagccacttttctctgtcctttatttcttcagcttttgttgtgatgctgtggatggctgggtggctcgtagattcaaccaagtttcaacatttggagctgttcttgacatggtcacagatagagttagcacggcttgtcttctcgtgattctctctcaaatctacaggcctagtttggtcttcctctcattgctggctttagatattgctagtcattggctgcagatgtacagtacgtttctagcagggaagagcagccataaggatgtgaaagacagcacaagctggctttttagactctactatggaaaccggatatttatgtgttactgctgtgtttcttgcgaggttctgtatatcatccttcttctcattgcaaagaaccaatctgaaaatctcctgaatgtcgtagttgctacattaacacagatttcaccactctcttttctccnnnctttgacattgttcggttggtcgatgaagcagaccattaatgtcattcagatgaaaactgctgcagacgtttgtgtactgtatgatatagagaagcagcagaagccttgatcatcttcctttgtctcaacctgaaactcttttttttctttcattgtttgttctcttttcactgtggatgtagataattgtttttaatgaaatgaagaaatattgatttgccttttgac

SEQ ID NO: 330 - DNA, 952 bp, Arabidopsis thaliana
atatgttttcatgacaaattataacacaatcgtcttatattaaatcttcacccaaaagaagaaaaaatttagtcaccttctagattctattgatctctccatatagaatcaaagattcacagtataaacgtataaataagctcttaacgatcttgttttgttttatgtgtcagaagtggaacactctggtttgctgagttcatcacccaacatgtgatgaagaagtgtatcaactctctgactccgagacttcgaccctgcagatcgacgcctgtttcttttttcttgagaatcctgtccttgacatttttcttcttcttcaagatccagctcagtaaagaacgcctccaagacaaaggcaacaacctgaaacaaacacgcattataagtcgatctaagaagcagagttaagtttctttacaacaatcatggcctctgtttgatcgagctcttaggagttggcgtcagtgaaactcaccaaattcaacagaagtaaaatagtgatgacatagaaactgacgaaatatgtaatgctccaccacgtgcccgtcaaatctttgtagctctccatccatacttgccagttacccataactagcagattgaagagtgtgaccattccattggggtagtcattgaagttgaacaaaaggtagctgagtttttcccgtcaagaaacgatcttatactgaaaacgtttttaccccagtaataaaaaattaaaaacacactagcaatcacaggaacagagaaggtgtactaagactgtgttgagtgcattaaaagtttttcagaaagttaaaaaggatactcatcctcagccaattcggtttcaaagagctttttgttcccagcattcacaagccctccaaagacctacggagaaatgagatgaagaaatttttatatctgatttgggaaatagaacccgtgagagaagacagggaaaaca

SEQ ID NO: 331 - DNA, 951 bp, Arabidopsis thaliana
  misc_feature (1)...(951): n = A,T,C or G
acgattcatcaatcatcatctccgatcttcttccaaatctctccggtgacaaagacgatgtacgtaagagcacttccgacgacggatgtgaatcggaacacagagtggttcacgtatcctggtgtatggactacttatattctcatcctcttcttctcttggctcctcgttctctccgtcttccattgatctcctggcatcgcttggaccattgttcatctcgctcatttcaccgtcacgtatcattccttccattggaagaagggaacaccatttggagatgatcaaggagtctataatagattgacttggtgggaacagattgataatggcaagcagcttacacgtaatcgcaaatttctcaccgttgttcctgttgtcttgtacttgatagcctctcacacaacagactatcagcacccgatgctctttctcaacacactggctgtatttgtcatggtggttgcgaaattcccgcacatgcacaaggtccgcatatttggaatcaatggagaccaatgaaaaaacttgagaaaacaaagaaaaaggtatgtgtataatgcgaatcagagtatttggaatgtggaatccaacaacaaatgccatcatcatcattcaacatgtctgtactatacagacattgaatcccctaaccggagaaaatgtgttatttggtcacatcccatcatcgcatattcaaacctttctactctttgtttggggcttctaatcaattcatatttgatctcttttgtggttctcttagtttcttatttgtataatcccaaaactggttacaacagaaagttgtttagcgagcaatctagggtttgaatgaatagttggggaagatttatttatatataccgtttttgatatatatattcttcattattanggtgtgatatctaacacagtggtattacatatctttggaaaaaaatcatttga

SEQ ID NO: 332 - DNA, 950 bp, Arabidopsis thaliana
aggttctttcgactctgctattgatggttgccatggagttttccacactgcttctccattttttaatgatgccaaagacccacaggctgaacttattgatcctgcggtcaaggggacgcttaacgttttgaattcgtgcgccaaagcctcttcggttaagagggttgttgtaacctcctccatggctgccgttggttacaatggaaaaccacgcacacctgatgttaccgtcgatgaaacttggttctctgatcctgagctttgcgaggcctccaagatgtggtatgttctatccaagactttggcggaagatgcagcttggaaactcgctaaagagaaaggcttagacattgttactattaacccggctatggtgatcggtcctctcctacagccaactctgaacacgagtgctgctgctatattaaacttaatcaatggtgcaaagactttcccaaacttgagtttcggatgggttaatgtaaaagacgtagccaatgcgcacatccaagcatttgaggtcccttcagctaatgggcgttattgtttggtcgagcgtgtcgttcaccactccgagattgttaacattctacgtgagctttacccaaatctcccactacctgaaaggtgtgtggacgagaatccctacgtgccaacgtatcaagtgtccaaggataaaacgaggagccttggcatagactacatacccttgaaggttagcatcaaggagaccgtcgagtccttgaaggaaaaaggtttcgcacagttctgagaaagcatttgagccaatggatttaatccagattagataaagtatttggaagactatttcagaaataatatttggaacatgtcaatgttctcaaggagatattagtatgttcttgtgtactttattgttgttccatcaaatgagttacttttccttttaaaaaaaaaaaaaaaaaaag

SEQ ID NO: 333 - DNA, 950 bp, Arabidopsis thaliana
tcgtgtttcctgtttcattgatgaatgtctgacagatctgtgatatctctggttttctgttcaggcaagacgtcgtagaggacgtactccaactccaggaaagtacttggggctgagaactgctcgaggacgacataagtctcctagctactctccccgcaggtctgttagctgctctcgtagtcgtagtcgaagctactcatctgatcggggcagatcttattctccaagctatgggagaagaggaaggtcatcctcgtactcacccttctatcgacgacgcagattctactctccttcgagatctccttcacctgatgatcgttacaacaggagacgcgacagatcatactcaccttactacaggcggagggaccggtccagatcctactcacgtaactgtagagcacgggacagatcaccttactacatgcggaggtacaggtccagatccaggtcatactcgcctcgctacagagcacgtgaccgatcatgctcaccctactacaggggaagagaccggtcttattcaccccactaccaagggagagacagatcctactcacctgaaagtcgttactacagaaggcacaggtcggtatcgggaagcgtaagccctggagggagaagcatgtcacgtagcatatccccaaggaagggaaggaaagagagcagaagcaagtctcggaggcacgacaggcaatcttcaatgtgtcattcgaggagcgcaagatcaagcacctccagatccgtcagcccataacagtctctacttacttgaagttgacatcaatcactcacgtctgttgttgtattaagcattttgggacttgtctattccttgtatttggaattgatgacagtacgtatgttatgttggtttggtgttaggatactttattacttctgtggaaatgttgctttggcgacgagtcgtgagagaaatggaa

SEQ ID NO: 334 - DNA, 950 bp, Arabidopsis thaliana
actaaaaaatggcaaacctcttggtctctactttcatattttccgcacttttgctcatctccaccgcaacagccgccacattcgaaatcctaaaccaatgtagttacaccgtgtgggctgccgcaagccctggaggtggccgacgtctagatgctggccaatcatggaggctagatgtcgcggcgggcactaaaatggcacggatttggggtaggaccaattgtaactttgactcctcaggtcgtggccgatgccaaactggtgactgcagtggtggactccaatgtactggctggggacagccaccaaacacgttggctgagtacgctttgaaccaattcaacaacttagacttctacgatatctcacttgtcgatggatttaacatacctatggagtttagcccaactagttcgaactgccatcggatactatgtaccgcagacataaacggacaatgtccaaacgtgttgagagccccaggtggatgcaacaacccgtgtactgtatttcagacgaaccaatactgttgtacgaacggtcagggatcatgtagcgatactgagtactcaagattctttaagcagagatgccctgacgcttacagctatccacaagatgacccgactagcactttcacttgcaccaacactaactacagggtcgtgttttgtccaaggtctaggctcggtgctactggatcccaccagctcccgatcaagatggtcaccgaggagaattaatagactcgtatctactgtatgtgtgtgtgtgtgagggtgtacgtagatatgcgtacgtgtgacgtgatcatatatacgttaccataaacacttaatggattataataaggcatgcaataataattacgttagtcgacccacgtataagttggacttatttttctctttccgatcaattaatgtaaaaataacaatttcgcttcgata

SEQ ID NO: 335 - DNA, 950 bp, Arabidopsis thaliana
cagccatcgctgccatttcttctccaagtttcttgggtggtaagaaactgaggctgaagaagaagttgactgttccagctgtgtccaggccagatgcgtcggtgcgcgccgtcgcagctgatccagatagaccaatctggttcccgggaagcactcctccagagtggctagacggtagcctccctggtgacttcggatttgatcctcttggtctttcatcggacccggacagtctaaaatggaacgtacaagccgagatagtccactgccgatgggctatgctaggagccgccgggatattcatcccagagttcctaacgaagatcggaatcctcaacactccgtcatggtacacggcgggagagcaagagtatttcacggacaaaaccacactctttgtcgttgagctcattttgatcggatgggcagaaggacgtagatgggccgatatcatcaagcccggtagcgtcaacactgacccagtcttcccaaacaacaaactgacgggcacagacgttggttacccaggtgggttatggttcgacccgttgggttggggatccggtagcccggctaagctcaaggagttgaggaccaaggagatcaagaacggaaggttggctatgttggcagtgatgggtgcttggttccaacacatctacactggcactggtcctattgataacctttttgcacatcttgctgatcctggtcacgccacaatcttcgctgctttcacacccaagtgagacaacgaaaaagggttatggggaggtgaatgcgtttgtgtgtgatcatgtttgtacaaatatcattttgaacttaaaattattatgtactttatataaattgtggtcgaatgcaaattaaggttccccgtaacactctcttttcctaactcaatgatcataagatgcttttacattgtcattcggagcataaaagagtcc

SEQ ID NO: 336 - DNA, 949 bp, Arabidopsis thaliana
  misc_feature (1)...(949): n = A,T,C or G
tttttttttttttttttaacaaggtatggttgacaagtaaaatcagagaatacagaacaaatagaagtgagtaagttcttgtttaatatctgcaaatttgtaacagagttcttgcttctatctcaagggtagactagttttggttagtcgcattgagcgacaatgttttttgtttgtcttttggatctgtagcagaaccaagaacaggatcgtgtctgagtagtctattgctgtttgctgctgtcagtaccatcataccgaggaagatcaaaactgagatagatgagaagataagcattaagccagaaccgaccggatctttcacctcttgcgcatactgaaccgagtctaacgcaagnnnagtgagtgggaacgagtaagcccaccacgcgacattgaatcttttcattgatttcttgaaaagatttggcctacagaccagggacatgaagatgaaaagtgaaaggnagaacaacatcttcnctacggcatcaaaagttccacaaatagagttccaggctagacttgccatggctggtgcagcgacgaacaagaagaaaattggccttaacttggctgggaagttgtttcctcccggtaagcgttgatagagggtgacaaagataaccaaatagtnnnnnattccgagtgagaacatgcatagagcacactcattccaacccatctctgctgctcctcgtgcagccacgaggtttgcgattaccgatacttngntngccgggtttgctagcatcgacaaaaatctcttctccgttgtgaaccactggccataaagctttatgtctagtgtcaagactggaacagcaaagatccagaatagtgtctgatacaaaacgctatttggttccatcattggagctgattgaagcatgagaagccatgaaatagatggagcgtagagatagttcactccgatatagtgcaagaa

SEQ ID NO: 337 - DNA, 949 bp, Arabidopsis thaliana
ctttttttttttttttttctaacaatatttgaaatatacttgtaaccatttgtttcttatattgacactactggtcttgtgttacatgaaagaatccattcacattttcgaaagtcgaaacagaatataataaacaacacataccaccatgatttcagctattagtaaccaacagaaaagacattcgaaagtcgaaacagatcttactagtggtccctccaaagtttatgaacagcgaggaaagttgagatgtagtcacttccacacaaatttggtcttgatacccccttcagattcctcaaaagaaacttcctttactaatgaggcagatgcattgtactcaaatctgttagagagaagcacttcaagttcatagtcagaagcacttttagtgacatctaccatgacctgaacaagctcagtcttcctagtgctggccatgaagagatcatattccgtgggaataatgatagcgaagaagttatcactcaatttgcttaagcacatcttctctactgatgacaaagcaattctcctggtcatagcttcagtctcgggatcaattagatagatcgcaaaatcagtgaggataaaaatacgccgtttcatcttccccgagccggtgaacttcaaaactttatcagcaaaaagaatcgatgtatcaccttgtttctccagaattcgcatcaatccaggacgagaagaaacgtgaagatagtcaccacgatgctctctatagcgagacgctttccttctgactttacctccagcgaatggcgtgtgatctcctccgtctacctcacccacacttcgatcttcatcaaaatcaggtggaggtgattcttcgccgtcgaacttcggccccttttgctccttcaaccggttcattcctcccggcgacgaactcgaaatcggaatcggttagcttattctcagatcggacgcgtgg

SEQ ID NO: 338 - DNA, 949 bp, Arabidopsis thaliana
cttttttttttttttttttttttgataagagttcatcatctcatttctccctatttttggggttgtacatatgttattttatataatttacaaaaagaaaaaagcgcggagatgagatctattcttcatccacccacacaaaaatagcacatcttctatttatcccatatctcctgggaatatacttaagaaagaaactgtataaactagtaaaataccatttcttcagacaattattattaatactcctccttataatcatatatgtataatggggtatctctctctttctggatttgaagtaacaaaccactgttttgtgttcttcattggtattacccaattcaagggttttggtcagcaaaaatgtccaatagagaaagcacctcagggacactgagttcgagtcggaacttaggaccgtcgtagtggtgcaaaatgggtcggaaagaatcttcttccagtggcaaacatactttcctcgttatggccctcacctgagcagggaaacgagattcgccaggacatttcttgtcttcaaaagcattcaactcaatgtttgttcctccgaagctagctgcctcgtagattccatgaagttggtgagtggagtagttgtaaagaaacagaggaagtcctggagttatcgctctaaccgagtccctgtatcttggtggcaatccgaaaagctggcgtttgagattctcttccatggtatcgttgttgcagacaaagatgtaaccaccaatggtttcgtttcttggcaaagcttctgctggaggaagagtcttaaacctcttgtccaaaccattgttcttgtcgtcttcgttcctctggttattattgttctgctgattctttctgttcttcttcccacctttctgaatctgatgatcttcatcgattcctttgttcttgttgttgttctttagattgacgttgtacccat

SEQ ID NO: 339 - DNA, 949 bp, Arabidopsis thaliana
  misc_feature (1)...(949): n = A,T,C or G
ccacgcgtccgcatacaaggactatggataaaaggtggagtctccaaggtttgactgctcttgtgaccggtggagccagcggaatcggtcatgctatagtagaagaactcgccggttttggggccaaaatccatgtgtgtgacatatcgaaaactctgctcaatcaaagtttatccgaatgggagaagaaagggtttcaagtgagtggttcagtctgcgatgcatccaatcgtctcgaaagagaaacacttatgcaaactgtcaccacaatatttgatggcaagcttaacattcttgtgaacaatgttggcacaattcgcacaaagccaacaatagaatatgaggcagaagatttttcgttccttatttcaacaaacttggaatctgcttatcatctaagccaactttcacatccactcctaaaggcttcaggcaacggaattattacttttatttcctctgctgcagggatcgtatcatttgatgctgcatccatttatggtctaacgaaaggagctttgaatcagctagcacgaaatttggcgtgtgaatgggcaaaagacggcattcgagccaacgcggttgcgcctaattttatcancactgctctggctaaaccttttctcgaagacgctggttttaacgagattttgtcgagtagaactccacttggtcgcgctggagaaccaagagaggttgcctcacttgtggcttttctgtgtctacctgctgcttcatatattactggtcagaccatttgtgttgatggaggtctcactgttaatggcttctcatatcagccataggcttgagccatgtcttgtcttgtcttgtgtgttgtggagtatggtcatatggtcagtatctccataatctaaatccatagatatgtgagttgtggagtagacacaatttttcaataatggaatatctatttaccaaaaaaaaa

SEQ ID NO: 340 - DNA, 949 bp, Arabidopsis thaliana
  misc_feature (1)...(949): n = A,T,C or G
cggccgctttttttttttttttttggaaacttatccagcttttagaatgcgatattaaagtagtgcacaagaagttcctatatattgcaatgaagctattttttcttttaaaaggagagattgtgaaccatttcctgggaacagacgggaataaactaaaaaacttttgacaaccgtagtgaaagtattcaaaggctctctctctttcttcaaatgcttgcaactttggatttactcctctctgtagtctggattttccttcaatatgacgaaaccttctaatatgggcgacaacggaatgtacttctcggttgcgagttcagctctctccccagcagcaaggagaacaggtgttgagtgcgtttggaacccagtgattgtcttaggtcggcctgcctgtccaaccacatcaaccgcttgtcctacccgcactggcaccgagatgggcttcaggctctgatccaccgtcagcatcatcnnnngctgcatcgccaaaacaagnnagtagagcacatagtgatatttccccagtataatggatttcatgtcaaggcatgcatgcannaatgtcactataccagcaagtgcggttggcgatagcaagagccgttcggagtggaaaggattgagagttaagagaccctttcccatatgcacaaacccttgagcgatgcgcacacagaaaagaaggctggcatccttgtaataatagctggagagatttctaagcatgccagctatccttgcattgttggttccagcgcctatcaatccaagggagataattgctgccattgcaacttctgaatctgtcatggcttagtctgctcaaagtgtccataacagtcacctttgggtttgatatacataggagaccaagagccaaaggcactgcacgtcgaatgttctgctctccatactgtagtacgcgctccaaagaacggatctc

SEQ ID NO: 341 - DNA, 949 bp, Arabidopsis thaliana
ccgggcaggtccgcgccgagagcattttatatcttcaatcatcttacgcaggctgttgtagcagcagtgtctatcggagacgatgaagttcaacgtcgccaatccgaccaccgggtgtcaaaagaaactcgagatcgatgacgatcaaaaactccgcgcctttttcgacaagaggctctctcaggaagttagcggagatgctctaggcgaggaattcaagggatacgtattcaagatcatgggaggatgtgacaagcaaggtttcccaatgaaacaaggagttctcactccagggcgtgtccgtcttttgcttcaccgaggtactccttgttttagaggacacggaaggaggactggagagaggagacgaaagtctgtccgtggttgcattgtgagccctgacctgtctgttcttaacttggtcattgtgaagaagggtgtaagtgatcttcccgggcttaccgacactgagaagccaagaatgagaggtcccaagagggcatcaaagatccgcaagttgtttaaccttggaaaagaggatgatgtgaggaagtacgttaacacttaccgccgtaccttcacaaacaagaagggcaagaaggttagcaaggctcctaagatccagaggcttgtgactccattgaccctccagaggaagagagctagaattgctgacaagaagaagagaatcgccaaggctaactctgatgcagctgattaccagaagcttcttgcctccagactaaaggagcagcgtgatcgccgtagtgaaagtttggccaagaagaggtctagactctcttctgctcctgctaaacccgttgctgcttaaactgcctcaagattaagaaatttctttctctctagtttgtttctggtcgtatttaagttgctccacagacatgagaacgccattttgaacactatttttggtttctgttttgtgtca

SEQ ID NO: 342 - DNA, 949 bp, Arabidopsis thaliana
cttttttttttttttttttttttttttttttggaaagaatattatgtgtgctctacatggataacaaatttacatataatcagtaccatcgtccatcacttagactgcatatcacctcttgggagatgtagacaaacaaacattaaactgctagaacacactgaaaataccacaatttctcaccaatacccgatcgtcaacttgattgtctagcagaagttggaaaggtaagcttgagctaaggagagaccaagctggacttgagcctcggtggttaagtgaagattgtcggactttagcggcaatcccttagcatctacacagaccacattcgacagtttcagtcccaactgtgcttctctcaccttatctatgtatcctcctcccgatgctattgccacctgaataatgggaagagaaggaaggttgagatcatgacggaggttcttaatcaaacgatccatattgttcccgtagctctcggcgtcatggatgtccaacacgtcactctctccttgataccacaacaccgccttgatctctccgccgcatttcctactctcctccgttctcttgaccatcctctcgtacaagtggcttccacgctcccactcttttatcgccgttccaccggaagcgcacggcaccaacccgatcacagccgaatctgtttccaggcgattcttcaccgcgttagcgaacgccattcctggacctactccacacactttacctgtgtcaatgtcaacgtgtagtggctcgtgtgcttcttcccaccggagatctgcggacaggcggaggatcgatgagtttggtgcgcattccggtggaaggattttatcccacacccagcgattgttgtggtggtctttgaagacgccgccgcgtcctgccatattgctttgtccagagagtatgaagatctgatttggtggaattggagattgga

SEQ ID NO: 343 - DNA, 948 bp, Arabidopsis thaliana
  misc_feature (1)...(948): n = A,T,C or G
cttttttttttttttttcatatcataatccatttaccgcacggtccagctcaaaccggaaacaaagccaaatttgattttgccatcggtatgaactcaagaaatacagatagcaataacagtgcaaaggctgaagcatctttatttgtaacagaagcaaacgaaaacgtttccttaagaattaggcaaaaggcattttcggatcaatattcagcggtagaggctctccgacctcagattctctgcaatctctgtctcccacctatctccattctcaagaagcttctctttgtcatacagaagttcctcatgtgtctcggttgcaaactcaaagnnnnnnnnnnnnacgattgcatcaacagggcaagcttcttggcagaaaccacaatagatgcatttcgtcatgtcgatatcatacctagtggttctgcggcttccatcttcccgctcctctgcctctattgtgattgcttgagctggacatacagcttcgcagagtttgcaggcaatgcagcgttcttccccagttggataccttcgaagagcgtgttcaccacnnanncgagggctcaatggacccttctcaaaaggataattgattgtaacttttggatcaaagaagtacttgagggtcagtgacaaacccctgaccatttcagtgagaaatagggtgttcatgctccgttcaaagacagtactccagtccttggagatctctttagcaagctgctcagcttcttcatcatctttgttgcttccataagatatagcacgggactgtagcccacagagatgagatccctgtaaaccttgccctgaaaaagcgagatgtcgagctcggagagcactgaacgacctgcgagctagtagcgaagccatcgatagaactcaaaatatcaaattagggtctctcttcttcgatgtgccttaaacgcgatactcaaaaaag

SEQ ID NO: 344 - DNA, 948 bp, Arabidopsis thaliana
caatcagcaaaccctacattgtcacgaaccctagcttctccgaacaaaccttcctccttcgccaccttccgatctccatttctcagattcaattcaacatccgtcgcttccaatttcaaacccctagtttctcgagaagcatcctcatcgttcgtcactcgctccgccgccgagccacaagaaagaaaaaccttccatggactgtgctatgtcgtcggcgacaacatcgacactgaccaaatcattcccgcggagtttctcactctcgtcccttcgaatccagaggaatacgagaaactcggttcttacgctttagttggtcttccagcttcttacaaggaacgattcgttcagccaggtgagatgaagacgaagtactcaatcatcattggcggtgaaaactttggatgtggatcgtcacgtgaacatgctccggtttgtttaggagcagcgggagctaaagcagtggtggctcagtcttatgctagaatctttttcaggaactctgttgctactggtgaggtttatcctttggattctgaagttagggtttgtgatgagtgtacaactggtgatgttgcgactgttgagttgagggaaggagatagtattttgatcaatcatacgactgggaaagagtataagcttaagccgattggtgatgctggaccagtgattgatgctggtggtatatttgcttatgctaggaaagctggaatgattccatctgctgctgcttgattttgacttcaggtgtcaatggaagtgcatgagagtcacttcaaggatcttgatccaataataagaatatgtaatgtttccaaaagcttatgaacctaatctatgttttatgaatatatatgactatcggctttagtcttcagtatcagtttcttgtttacatttggatgtatcagctgctaaaaaaatgcatagtttcccatccca

SEQ ID NO: 345 - DNA, 947 bp, Arabidopsis thaliana
aattcgtatgcatcataaataaatttgatcttacaagagtgtatggccaacaacaaacaaacaaataaaagagattcttattgggagatactcaatacacgcactctggtaaacacagagcgacagaaacagggaatgtaaaaaccaacgattgtacatgaggagcgatgaagaaaaccagactcaagatttcacatttgtttatgtgtttttgactcaccaccagaatcagaacatgtagacgacactgtcgtggatcctggacttctggttctgtgcaacacattcagatatccacataaggttcctgatctcctgctctcttaacctcatatacgcaaagaataccgcgtaatggaactgctgctcaaaggctaagcaaagccttctgacttcttcttcataaaatgctttgtcgagcatctggctctctccataagacatcttcgagaatatagcttgatacggaggatatttctccataacaccacgaacctggtctatatcctcgcagatagcaagctcttcgtgaccatatggatagagtagaccaaagttagagtacagtttctttctgtcttctcttgtgagctcagtgccaatgctgttgatagtgatattcactgctcttctatcggcctcaaaggccaaaaggtcagacataatctccgctgttgcgccaccaagtttctgacagaacttgtaaaaatcctcaaggtatgctttgtagagggtgttcctcataatctctatgttcatgtcatcgagatcctctgacgttaagcattcagaaaagtatggagccaaaggagtatccacaagcaccaaccggtagagttcccgcatgttctgagcaactgctagtgtagcaatactgtcaaacatgcctaaagggtgacatttctcaatcaactcttgaacatctctctcatgcagggttccagtaa

SEQ ID NO: 346 - DNA, 947 bp, Arabidopsis thaliana
  misc_feature (1)...(947): n = A,T,C or G
tttaggtagtgtcaaacacatcaatctagtgaacctacgtggatactgccgtttaccatcttcaagacttctcatatatgattatctaaccttaggaagcttagacgatcttcttcacgaacgagctcaagaagacggtttgttgaactggaatgctcggttgaaaattgcgctaggttccgcgaggggtcttgcttatctacaccatgattgtagtcccaaaattgttcaccgtgacataaaatcgagcaatattctactcaatgataaactagaacctcgagtctcggactttggtcttgcaaagcttcttgttgacgaagatgctcatgttaccaccgtggtagctggcacctttggctatcttgctccagagtatctgcaaaatgggagagcgacggagaagtctgatgtctacagctttggagttcttctccttgagctcgttaccggaaaaagaccaacagacccgatattcgttaaaagaggcttgaacgtcgtcggatggatgaacactgtgttgaaagagaatcgattagaggatgtaatagacaagagatgcaccgatgtcgacgaagagtctgttgaggcattgctcgagatagctgagagatgtacagatgctaacccggagaacaggccggctatgaaccangtggctcagttgcttgagcaagaagtcatgtcaccttcttctggtatcgattactacgatgattctcattctgattactgttagggacttatgcacggctaaaagtaaccaggagatcattagcctgcgacggttttgttgttgttgctgctgcgttatgaatgttgtgatttgggagcgagggatttgtttgtatattagatatgaaggtggagtcaagattattgagcgtgcactgttcttgtgcactttatatttttgcaacaaaatgatcgatgttattgcgaaaaaa

SEQ ID NO: 347 - DNA, 945 bp, Arabidopsis thaliana
  misc_feature (1)...(945): n = A,T,C or G
tgcctcttccattagagtcatccccgacttccctaaaccaggaatcatgtttcaggacataacgacgcttcttctcgacactgaggcctttaaggatactattgctttgtttgttgatagatacaaagataaaggcatatctgttgttgcaggtaacaactcgtatggnnctgtttggtactccaatcgattaacagcttgtggatttannnnctttnggcctttttagatactgagtgctttagcttaaactgaaaagttgaaatgaattggtggatgatttttggttctgcctaaattgatgttgtggtaaatgcaggtgttgaagctagaggtttcatttttggccctcctattgcgttggctattggtgccaaatttgttcccatgaggaagcccaagaagctacctgggaaggttatttcggaggagtattcgttggagtatggaacagatacgattgagatgcacgtaggtgcagtagagcctggtgagcgtgctattattattgatgacctcattgccacgggtgggactctcgctgctgcaatccgactacttgaacgagtaggagtgaagattgttgaatgtgcttgcgtaattgagttaccagagcttaagggaaaggagaaactaggagagacgtcgctatttgttcttgtaaagtcggctgcttaacaagaaactggaagagaaggttattggatcgagtgttgatgctatttttcatgtatggtgagacattttgcgtgggatttgatccttgttgtttcaacttatcataattggttcagactagaaaatggcatttgaatgtcaggattcgattgcagtttcctattgttccacnnnaaatccccgattaataaggtgttatgggntttatttatagaatcaagttgtaatagtagactccaacaggggctaaagtcttggtaacgcaat

SEQ ID NO: 348 - DNA, 945 bp, Arabidopsis thaliana
ttttttttttttttttttttttttttttttaataatcattatagattaacgatcattaattaaactcatagttacaatgcataaaaactaggacaagccattaaatccagaaaacacaggaatctgctacagcaaagacatacattctctacactcaaaccacctcacagatgctctgcattatttaagaaagacaacacacgaaagtaaaacagagagcatcttaagtccgaaccatatgacaagagaaacatatttactcaggtacaaatttcttcctgagctcagagacgaattcagtaaccttctcaggatcaggcaaggacttagccacgctctccctctgcaaacacttcttaacccaagcaatcagtttcggaacctcagattcgatactgaagttagcaaacttctcgtatgctggaaaccatgtgtagaatccaatcaacgcaatgtctacatagccaaagtcatcgccactaaagtaaggtttgtctccaagctcagattcaagagtcttgagtatctcaatgaaatccttcttccctgcctcttgttcctcaccctttgtcgcccacaccttcctctgagcatcatacagcttcttgtcaatgaaatcagcccagaacctagcttgagctctcaggtaaggatcagaaggaaggatagggttcttgtgagaccagacctcgtcaatgtactgaacctggatgatagattcgttaaccggtttaccattgtggatgagaacaggaatcttcttgtgaatcggattcatctggagaagcaaaggactcttgttccttagatcttcttctctgtactcaaattcaacacctttctccctcaatgcgatccttgtcctcatcccgaacatactcggccagaaatcaagaagaatcacctcgttcgccattgttacgatcgctaaagctcacaaagaga

SEQ ID NO: 349 - DNA, 944 bp, Arabidopsis thaliana
  misc_feature (1)...(944): n = A,T,C or G
tcaagaagccggtttttcgcattgtgcggttagagcgaaagaagaatgcaattgggttggattcttcgatgtcgacgagttctactacttccctacgcatcgctctcaaggcttaccgagcaaaaacgctttgaagtcgcttgtatcgaactacacttcttgggatttggttggagagatcagaacggactgtcatagctacggtccatccggtctgacctcggttccatcacaaggcgtgaccgtaggttacacttgtagacaagcgaaccccgagagacacaagtcgataatccgccctgagttgctcacaagctcattgctcaatgaagtacatcattttcagttgaaagnnggagtggggcatatgagtttggtggagagtgttgcggtagtgaaccattacaagtaccaagtttgggacactttcaaagctaagttttacagaagagtggctacttatgttgttgactggcaagagaatcagaatcnnnnntctaaagatcgagctccagggctcgggacagaggcaatcgagccgccggattggaaacgacggttctgtgaagtgtgggacactggattgaaggatttggttatgtcgaattttgctgatcaagtgactggttatctgccgtggcagaggcaacaacaagaatgacttttagttggtttctgattcagcagcaggtgtacattttatttacatttgacaaggatacatacaaaatctacatcaatatttctttcttttgttacttacatttttttttttggttttgttgattggtgggggataaagttggcttataatatcttttgtttcttagagtttaccacatgtaaatttcggtaacactgctaaatccctttttttttgtttttctttcttgttcttatatgaatggaagtgaaagatttcaagaaaaaaaaaaaaaaaaaaa

SEQ ID NO: 350 - DNA, 944 bp, Arabidopsis thaliana
  misc_feature (1)...(944): n = A,T,C or G
cttttttttttttttttttttttttttttttttttttttttttttttttttttttttttttttaggggaaannnncatttccttaaaatngaaagcctcacaaagccataaagatacttattaaactacaaaaggaaagagaacacagaggtggcaacattacattaagaggtacatttagttccacttttattaaacctctcataaaacacaaaccacatcaccaagaagatgaacacatcttaagctgggaatgaatacttggcaacagtctccttccacgcaggacggctgctaatatcatcccaccacgcgctcacgtgtttcctatctttgatcatgtaagctttcccaatcggaccaaccaagtaatcagtgaacgggaggtgagccaaatcagccaagctcacgaagtcaccggccaagtacttgctctttgagagatgtgcctcgtagacatcaagaacacccgcaagcttctcttcactctccttgatcagcttctcatcagatgggaatcccatgactgatgcgaacattatgtgaagcgttaagttcaatagcggtgggtggtaagtggtcgcttccacatcaagccattgttcaacttgacctctgtcttcaacggttttccccaaaagatcaggtccttgtgacctgtacttctcagctacgtacctcatcaccgcacgggactcgaagattttgtagtcaccgtcaacaacagcaggaacagtaccaaaaggctgtagagcgagataagcaggctgcttgtgttctcctttcatgagatcgacggggatggtctcgaaggcaacgcccttctcgatcagtgtgaccaaagctctctttggtgaagcaaagtgaggtccgtacacctttagcaccatttttctttcttctcttttttactcacagtttaacctgcccgggcggccgctcga

SEQ ID NO: 351 - DNA, 944 bp, Arabidopsis thaliana
ggttaaactccgtttattgatttggactgtacattctcgtattggtgtctgacaaaactattagttcatacgtcccggcctatctaaaagcaaaatctgaattatgtagggattttagaaatagaagaaagtaaaagttgaggaactatcgttctcagaaacaaattgaagacttcaaatcaaacataataaacaaagaacacatgagaactgtttcagaatgagaaagagaccatagaagaatgaacatgaactgatattatagagattccttgaggctcaaggtttcttctttcatggtttccaaaggattgtggattcagcaatcatggaggtcacagtgtaaggatccatgttcgaagctggcctacgatcttcaaagtatccttttccagcctgctcagtgtcacgcccaaccctaatcgatgccccacggtttgccacaccccataagaaagtgttgatatcggcggtttcatgttttccggtgagacgacgctcgttgccttcaccataagcagcaatgtgttccttgtgacgcaatccaagcttctctattgctttctttatcacctcgtaccctccatcttctctcatcgacttcgtactgtaatttgtgtgtgcccctgcaccattccaatctcccggaattggtttagggtctagagacagaacaactccagccaattctgtgatcctctcaagaatgtaacgagcaacccagacctgatcggcggcagcgattccaacggtgggaccgacttggaactcccactggccaggcataacttcgccgttagtcccactgacattgattccggcgtaaagacaagctttgtaatgagaatcaacgatgtctcttccaaaggctttgtctgctccaactccacagtagtacggtccctgaggacctgggaaaccgccgaccggccaacctaccggcc

SEQ ID NO: 352 - DNA, 943 bp, Arabidopsis thaliana
aaaccagagaagaaaccttctcaaaccattcccctttcatcaaacaatttggttgatcaaagcaaagtggtatcacctaaaccgggaatacaagaacacaatgggaagattggagaaggcggcgaaactagactctttagtttcctaagccttccaagatcgcctggaaaagagagcaatgatgatttttctgatgatgatgacgaaaacaacaatgagattggtgtagagctcgatctcgaatcagtaatgtctgacacttttgtctctgtcgggaaataccgagtcagatcgggttcatccactatactaagtgctgtcatcgaaaagcacggagacattgctcaaaactgtaagctggaatcggattcaatgcgatcacgttacctcgagtgtttatgctcactgatgcaggaacttaggtcaaccccggtagggcagttgagcaaagtcaaggtcaaagagatgcttgcggttctcaaagacttggagtctgtgaacattgaagtagcttggctacgttctgttcttgaagagtttgcgcagtctcaagaagatgtagaaaatgagaaagagaggcatgatggtttagtgaaggctaagagagaagagcttgaggctcaagaaacggatttggttaggatggagaaggaagtggtggaagtgaagcggcggattgaggagacgcgggctcagatggttgagatcgaagcagaacggttgaggatggagaaaatgggattcaaaatggagaaatttaaagggaaatcgtttatagatgagcttctgtgagtttgagttgtgtgtgatgttgttagtagtaagccaagggtagtaggtaatagcacaaaatcaaaaatgctctaataaatgagtttttaaggttagggtttttaagtattatgggaaagctggtatttattggtaacttataaagcggccg

SEQ ID NO: 353 - DNA, 942 bp, Arabidopsis thaliana
ggggatgtgacggatcagttttgttagataaaccaaacaatcaaggtgagaagagtgcagttcctaacctaagtcttcgagggtttggcatcatagacgattccaaggcggctctagaaaaagtgtgtccgggaattgtttcttgctctgatatcttggcacttgtcgctagagacgcaatggttgcacttgaaggaccatcatgggaagttgaaacgggaagaagagacggtagggtttctaacatcaacgaagtcaacttgccatcaccttttgataacatcaccaagcttatcagtgattttcgttcaaagggcctcaacgagaaggatctagtcattctctcaggtggtcacacaattggaatgggacattgtcctttattgacaaaccggctttacaacttcaccggaaaaggagacagcgacccaagtttggactcggagtacgccgctaagctcaggaagaaatgcaagcccaccgatacgacgacggctctagagatggatccggggagtttcaaaacatttgacttgagctacttcacgctagtggctaagagaagaggacttttccagtcggatgctgctctactcgacaactccaagactagggcttatgtcttgcaacagataagaactcatgggtcaatgttctttaacgactttggtgtctctatggtgaaaatgggtcggactggagttcttacgggtaaggccggggagatccgtaagacgtgtcggtctgctaattaagagatatagaaatgaaaatatctcaatatatgtgagtttgattattattgtttgcttcttttattttgttgtcatccctatattaaatgtgattgttttcttgggtattgtttcttgggaataagctgtatctaaaatttataaaagtcttgaaagttcagaatgttattattaaaaaaaaaaaaaa

SEQ ID NO: 354 - DNA, 942 bp, Arabidopsis thaliana
  misc_feature (1)...(942): n = A,T,C or G
cttttttttttttttttactccaaaacgtacgtatgtacataaaaacaaattagacagatacaaacttgttcatattaaaaaaaaagttatatcgtttaacagtttttttttcttcttcttaaaagtacaacataacaagaaaacccaaagaaattgagatctcaaacccaaattacaacgccttttattgtatcaaatgaaacatgtaactaaaggtcgcacatatgcagattaacctcccattaccaaatagatcatgaaactaacaaatttcttgaagaaacgaaacttttggagtcgtccagagactctcaacgttctacatcgattaagcgggacatttgaagtcagatggtggagtttttccacagtcgagaagaagctcaagagcaatggggagaacaaggtcgatgttgagaagtttgagcttaatggtggtacatagacaaacggctgcgtctaggtcaagtaaacctcctaaaaccggacaacattctgccttggcgtggctttttccaagtccgatgtgaatcaaacctccaagaacgtccacacaagcgcctagcttcagcgtgtcaattgggcaagtctctggaataggcgtaggaggagttggtgttggtggtgttactacgggtggtgttggtgttggaggtgtcacgacgggtggtgttggtgttggtggtgtaatgacgggtggagttggtgttggtggtgtaatgacgggtggagttggcgttggcggtgttacgacgggtggggttggtgttggtggagttatgacgggtggggttggtgttnnnngtgttacaactggtggagtcggcgttggtgttggtggtgggcatggtgtaggcggaggcttgtggtggggtggtttcggagtagacggaggaggcttggtcgtgggaggtttaggtgtggacgggggaggtttggtg

SEQ ID NO: 355 - DNA, 942 bp, Arabidopsis thaliana
cggccgcccgggcaggtctccaacccaaattcctctcttctcaacctcgtcctctccgttctcctcctccaacatttctccgatcattgatgggttcgtcttcttctttctcctcttcttcctcgaagcttctctttcgtcaactctttgagaacgaatcttccacctttacttatcttctcgccgacgtttctcatcctgataaacctgctttgttgattgatccggtggacaagactgtggatagagacttgaaactgattgatgagttaggattaaagcttatctatgctatgaacactcatgttcatgctgatcatgtcactggtactggacttcttaagacgaagctcccgggtgtgaaatccgttatttcgaaagcaagtggttccaaagctgatttgtttcttgaacctggtgacaaagtatctattggtgatatataccttgaggttcgtgctacacctggacacactgcaggatgtgttacatatgtgactggtgaaggagctgatcagccccaaccaagaatggcttttaccggggatgctgtactcatccgtggttgtgggaggactgactttcaggaaggaagctcagatcaactctacgagtctgtacattcacagatatttacattgccaaaggacacattgatctatcctgctcacgactacaaaggtttcgaggtaagtacagttggagaagagatgcaacacaacccgcgtctaactaaagataaagaaacattcaaaaccattatgtcaaatctgaatctgtcgtatccgaagatgattgatgttgcagtaccagcaaatatggtctgtgggttacaagatgtgccttctcaagccaactaaaaaaaactcttacatataatgtttgtctttttatcgatgtcattctatatttaccaaagccaataaaaactcttgagagtaa

SEQ ID NO: 356 - DNA, 941 bp, Arabidopsis thaliana
  misc_feature (1)...(941): n = A,T,C or G
ttttttttttttaaaccaaactaaactatgagaatgaataaatccgattacatcaaattaaaagacacaaatatctctcattaaacacacaaaaaaagatctcaaactgttctaagaagtctcataatcatcaattggtggggttgctgcggaatgaagccaaggctttgattgctgcagctctcaagatatattgatggtatgnnnctgctgctaatgctcccacgaatggtccaacccaaaagatccaatggtcgtcccaagctttctcattgttgtagataacagcagcaccaaagcttctagctggattaatcccagttccagttatggggatagtagccaaatgcaccatgaacacagcaaatcctataggtaacggagccaaaaccgggacgtgagagtcacgggcacttcttttggggtcagtggcagagaagacagtgtaaaccaagacaaatgtgccgataatctcagcaccaagagcagttccggtgctataaccatcagctacggtgttagctccgcctccgagacgtttgtatggagtcatcataaaggccttaacgagtccaactccacaaatggctccaagacactgagccaccatgtaagcaactgctctagggagcgacactttacgagccaagaacagaccaaatgtcacagctgggttaatgtgacctccggagataccggcggtgcaatagacgaggacaaagatcatgccaccaaaggcccacgcaatgccgagtaaaccaacaccgccacaaggaccggtttggtttttgtggccaatgactgtagctacggttacatagaggaagaggagagtggcgatgaactctgcgatgatagctctgtagaaagaccagagcttaagctcagccatgtctagaagtggagctggaggtggatccacgtagtctttgccatgtctt

SEQ ID NO: 357 - DNA, 941 bp, Arabidopsis thaliana
ttcaaggaatcttgatttgaccacttacacatacagcacatattccgaatcaactcagagacattacatgattctcatagagaaacataaacacttcacaacaactacttatccacgcctctttttcagtttcatttatgtatcaaaagacaacaagacgatacaaacaaacaggaccaatgagtctgttttgcttcatcaggcagccttactaggcttttttttgtgaagctgcagatctaatggcggtttttgcaagcgtcgaaggcttgagtacactcttcgggttaatagcctttctgattttgaaagcaacccaggctgtgccaagcgcatatcctgctgcatcgagcccttcgtttgtcgcctcagccgctttaccaccatacttgtgatcaacgagttcggttgtaacagtggaagaggttgacattacattcctcccagctacttcaacagcgtcacagaccttattgaatccgtcaagagatgcaaggatgacttctccaggaagaaggctgaagaatttctttcctactttggtgtttgcaactgaacttgtgaaaaatccagaaactttaaggactccagacagtatgctgtttgctacactctctgtcattttggtcatcctcttcactcttctgattcttttcaaggtgtcagggtgaacttcactctccttctcagcctttgacaacctccttttcatgaaaccatttccccaaataagcctatccatagtcacatctccacaccaaagaatcctttttatcaaatgtcctgagccagttgcaatcagcttcgccgccttcccgctataatcctccacattcggagccaaagtcgtccaataagcagaacattgcctctccacaatctctttcctttccccagtaagctccaccggagacgtctctctcgccaccgtcacatccaaa

SEQ ID NO: 358 - DNA, 941 bp, Arabidopsis thaliana
ccacgcgtccgctttttttagttcccaaaagatcgaacttggcgctactttcattttctcatctctgtttttccaacatcctaagaacagagttcgttgctccttttgttttctttaaagaaaaagtcagattcagatacatacatactctgaagaacatgtcgacgcgaagacgaactttactcaaagttataattcttggagacagcggggttggcaaaacatcgttgatgaatcaatatgtgaataacaagtttagtcaacagtacaaagctacgatcggagctgattttgtcactaaggagcttcaaattgatgacaggcttgtcacattgcaaatatgggacactgctgggcaagagaggtttcaaagtcttggtgttgctttctatagaggtgcagattgttgtgttcttgtctatgatgtgaatcacttgaagtcatttgaatctctcgacaattggcacaacgagtttcttacacgggctagtccacgtgacccaatggcattcccttttatacttcttggtaataaggttgatattgatggaggaaatagccgagtggtatctgagaagaaggctagagaatggtgtgctgaaaagggaaacatagtctatttcgagacatcggctaaagaagattacaatgtcgatgactccttcttgtgcatcacaaaacttgcccttgcaaatgaacgcgaccaagatatatatttccagccagatactggttcggtgcctgagcaaagaggaggttgtgcttgctgaatgctgaagaaacatttcttactctcttgatttatgcattacttgttgtgtgtgtctataatcttaatgctgagaaggaccaataaaacttgtattgttccctaagtaaggttttgttacctttctggttcttcatctttgacatttggtggttcacgatttgtatgtaac

SEQ ID NO: 359 - DNA, 941 bp, Arabidopsis thaliana
  misc_feature (1)...(941): n = A,T,C or G
tgttttgcttctagatccgatccaatccaatcaaacaaaggatccgattgatcagaaaaaatccaccaaatttctcaagatcgaaacatataattgaagatgagcgacgtatttgaagggtacgagcgtcaatactgcgagctctcaaccaatctctctagaaaatgtcactctgcatcggttctctccaacggagaggagaagaaggggaagattgctgagatcaagtctggaatagacgaagctgatgtcttgatccggaaaatggatcttgaggcaagaagtttgcagccgagtgctaaagctgtgtgtctttctaaactaagagagtataaatctgatctgaaccaattgaagaaggaattcaaacgagtctcttccgcagatgctaagccgtcttcccgtgaagagttgatggaatccggaatggcggatctgcatgcagtatctgctgatcaaagaggaagattggcaatgtccgtggagaggcttgaccaatcaagtgacagaatcagggagagtagaagactaatgctggagacagaagaggttggcatctcaattgtccaagatttgagtcagcaacgccannccctccttcatnnncacaacnagcttcatggtgtggatgannncattgacaagagcaagaaggtgttgacggctatgtcaaggagaatgactaggaacaaatggatcattacatcggtaatcgtggctctcgttctcgccatcatcttgatcatctcatacaagctttctcattaatactcaaaaaacattattcatcgtgattgtgtatatatatatgatggttgatttactttgtaatggcccaagtggttacttgtatttttaagtacgatgtttgtattgaagtggcaacacttttaacattcataaggtttcccaagtcaaaaaaaaaaaaaaaaaaaaaaaaa

SEQ ID NO: 360 - DNA, 941 bp, Arabidopsis thaliana
  misc_feature (1)...(941): n = A,T,C or G
agggaacaagaaccgtcgtggtcgaaaacgaagaccttggcggcaggtcatgtacggatctaggggggccatgtttgggagcggggggtacgaggtgggatcaaagagacaaagaatgatgcaatcaaatccctacttggcagttggcactggacctaccagctttccaccttttggctatgccggcggattcccagtcgttcgcctcaggggtcttcccttcaactgcgctgacattgacatcttcgagttctttgcgggcctcaacattgtcgatgtcctgctcgtcagcaaaaacggtaaattctctggggaggcctttgtggtgtttgccggccctatgcaagtcgagattgccttgcaaagggacagacacaatatggggaggagatacgtggaagttttccggtgctctaagcaggactactacaatgcggtggctgctgaggagggagcgtatgagtatgaggtacgtgctagcccaccncncaccgnnnnatccagggcaaagaggtttagtgagaaagagaagcttgagtacacagaggttttgaagatgcgannnctcccttactcggtgaacaaacctcaaatcatagagtttttcagcgggtacaaggttatccaaggacgggtacaggttgtgtgtcggcctgatgggaaggccacgggagaggcatttgtggagtttgagacgggggaggaggcgaggagggcaatggctaaggacaaaatgtcgattgggtcaaggtatgtggagttgtttccaactacacgtgaagaggctcgaagggctgaggccagatctaggcaatgactctttccttcactatgtatcattatatatatcctttggaccaattttgttaggttaaaacccaaaatgtttatcagtggaatcatagtaatgtaagacctgtgtggttcagtttcaaaaaaaa

SEQ ID NO: 361 - DNA, 941 bp, Arabidopsis thaliana
agtttcttcaatataatagtcaaatttccaggaaagaaagaaaaacccacctaatccaataataataaaaaaagagaagaaaatttcccaaaatcaaaaaccctaaatcgaatcaaaatcctttctaataagaatgaaataacccaaaacagcacaaaccgcagcaacagcattgccttctttcaaaagaaccttaaacacaaatccaaacacttctcttgtaatcttacgagcttcaacaaccaatacccttctcgatttcccaaaaaacgcaagcaacacaaccaccgatatccagatcaccataaccgccggaaccgcaaccgcagccgccgcaaccatcgacatggctccaaacacagctcctaacaccacagacgcgtaaaccgccggtaatcttgacggagacggcgatgacgtgtactggagcttgtaccagctaagcacagatgtgagaaagttccatgaggaagccaggagaatcgcgtagacagctacaaagagacaaacccatgtccgtctcttgctcatgattcgcataaagataaggtacgatcttggaggagagccattcgatgttcttggcgatcctgttggatccatcatcggcgatctgattgagattttttattgagggattttttctttctttgtgttggaaattgaaatctccgtgatttgagatttgtgctgaagaactagaagaagaagaagaagaagaagaagaagagagagagcacaaaaaaaaaagtgaaagtcttcagatttggggaaaatagattagttcacgtgagtcccactctcatgttaaagcgcgtgttaatcactcgttggtttagaggcttgtagtggagtacacgcgcttaagtttcgttttatttattgatttcccccaaaagagaccagacatggaaattaggaacaaatgaatatacatggaa

SEQ ID NO: 362 - DNA, 940 bp, Arabidopsis thaliana
  misc_feature (1)...(940): n = A,T,C or G
tatccaaatcccttttattgaatgtaattcgcttgtcttacaatccatgggaatacataactaatcatacaactgcagataaaactttatatagataacttaagtgagagacaaacagacacacacaaacaagttctagacaaacaaaaaaaaaagagaaaaagcaaagagattgnaacttgagatcggcgccacgaactgaggtttattactgatagtacatgagttgctgtgcggcggctacattctgaaagccaccatcatacatggctgcagttgctccagcggcatttattccatgagcctgccttagagggtgttgaccctgttgatgcattaacgcattcacacttgccatcttgctaagtgccaattgcctctcatagtttaggagatcagctgcagatagaccaggaactggagctggggcaggtgggggaagtgggtttgaggctgtacctggtggagttggcttgtttccccatgagcactttatctgtctgttaaagaggtaaggctgagtgttacccatctgaatagcaagagcagcttcgggatgagtgttatatctcacgaaaccaaagcctttgtctcgttggacacggacctnnnnnntaactccagcgccaagagcatggaagtaacggtgtagatcaagctgagttacctctggagcaaggtttcccacataaacagtggtaaactgagaattattttcaggtgtttcctcatttaatgtctctttaccatcctctgatgagccagttgtaagttccacaacactttttccatcagaactgagcttatcatcaccagaagtagcgcccttcgtggcccagttgcatctgatttgtctgctacttaaccacttaccattcatctcattaatggcagtttgagcatcctgttgattgcggaaggaaacaaaccggacgcgtgg

SEQ ID NO: 363 - DNA, 939 bp, Arabidopsis thaliana
ttttttttttttttaaaagtagcaaatgaaacgttttaacactttaaatcaaaggtagagaggaacaaacagctcaaatcttccaaacctgaaaacctaaaccgctaactaaaaactttaatcaacaaccctctgttttgttcccactcgccttcccctctgccgatatatagagttcggaggttaacttggtcagacggtgtagaatcatctgccttccaagcttccaatcatcaatcttatgtttgtcgccttctgctcgcacctctgcttcgagcccaccggttccttatgatcataccgcgaattccccggcttgagatggcagccgaacgcggttgaagacggcccaggtcgaatgctccaagctcgaataccccaccttccatttcgtcatccgacgaatcactgtaatcgtcactgtcatcttgatgatcataaccattgtatggctcaatcacatagtctccaaataccatagccccaggtgttgacgacatgactgtgctgattacatcactcctctccctctcaacctcaagcttcttccatttcgcctccagcacagggtctatggctcttggcttggctctcggatggttctccttaacatgcttcttgagctgtctatagcttccataaaacaaacactcgtcgttcatgcatgaccttttcttagaattcagatacttacgttccttttccacaacggtccagcctttcacctgacccctacaaagcgggcacaatagctctggcggtttgtcacttttctcatccttggcatatgcctttttgtactgctctagacaatttgagaaacggtttcccgtggcacacatgtacggacggcatcctttgtggtaagatgaacaaaggaggacgaccgagttgtgaggaacctcaagacagacagggcatgtcacacccgtccaaggt

SEQ ID NO: 364 - DNA, 938 bp, Arabidopsis thaliana
agagaatatgtattcttcttattaattatgatgtgagtacaaagagaaagataatctagagtttagattacaaacttgattgagaagtaacttaacatatatacttatcttcgtatattcttctctgtacaaagactgacactattagacaaaataaaatataaaaaaaggaaacaaaaaatagaggaagaagaaagaagaaacagacgacgacgttgattcatttcttgggtttttggcttccttctcaagccattttgtttactctctttctcttctctcgataaacctttcttttcttccttttgctaatcgtttattgataatcctccattaaagctctcacggaagctcccacgagaacaccttctttccaccacataaaccagagactttccctctcacgagaaatcagaaaacaaaacccattttctctactttacagctcgtctctgttcttccctctgtgtatatatatagtctctgtttcttgaacctgtaacggctaagtctgaagaagaagaagaagaagatgatgatgagatttaccaagttggtttggtgtttgatgttcctgcttcgattcggcttcttcacggaggcgattctcgacccagttgatttcttggctctgcaagctattcgtaaatccctcgatgacttgccaggttccaagttcttcgagtcttgggatttcacttctgatccatgcggcttcgctggcgtctactgcaacggagataaagtaatctctctcaatctcggcgatcctagagccggttcacccggtttatcgggtcggatcgacccagcaataggcaaactctctgcactcactgagctctccattgtccccggcagaatcatgggtgcgttaccggcaacaatctctcagctaaaagaccttcgttttctcgcaatcagccggaatttcatct

SEQ ID NO: 365 - DNA, 938 bp, Arabidopsis thaliana
ggccgcccggcaggtaacaaaaagtcttcatctttaatcattcaatggcttcttcgtcttctatgcagatggttcacacttcccgctccattgcccagattgggttcggtgttaagtcgcaattagtttctgcaaatcgaacaactcaatcagtttgctttggagctcgttcctctggaattgcattatcttcgagattgcactatgcatcacccattaagcaattttctggggtttatgcgaccaccaagcatcagagaaccgcttgtgttaaatccatggctgctgaggaagaagaagtaatcgaacctcaagctaaagtgacaaacaaggtttactttgatgtggaaattggaggtgaagttgctggaagaattgtgatgggtctctttggagaagttgtgcctaaaaccgttgaaaacttccgtgccttgtgtactggtgagaagaaatacgggtacaagggttcctctttccatcgtattattaaggatttcatgatccaaggaggtgatttcaccgagggaaatggtactggaggtattagtatttacggtgccaagttcgaagatgaaaacttcaccctgaagcatactggacctggaatcttgagcatggcaaacgctggtcctaatactaatggaagccagtttttcatttgtaccgtcaagacttcatggttagataacaagcatgtcgtgtttggacaagtaattgaaggtatgaagcttgttaggactcttgagtctcaagagactcgcgctttcgatgttcccaagaaaggttgtagaatctatgcctgcggagagctcccgttagatgcttgataatcaccattgaccggtgcattgtcattgccatctttgttctgttttttgctattatgactattgaggattccaaactatcaaaaagccaaagattttcaaattctggtc

SEQ ID NO: 366 - DNA, 938 bp, Arabidopsis thaliana
tcgagcggccgcccgggcaggtctttaaccggcgaaagaaaccaccctctgactgttaagaaaattctcatcggcgtttagatcagaaacttgggaatcggagaagctcactgagaacaatggatatgagacgtgcttcgatgtgtatgatgttaatttgcgtctccttggttctcctttcgggttttggccagtttgtgatctgcagtgaagaaaaaggaacgtacaacgacaacgtcgtaaagatgaagcttggtggatttagcgattccaagaacgattggaacggtggaaaagagatcgatgatattgcactcttcgctgttcaagagcacaacagacgagagaatgctgttcttgagcttgctagagtattgaaggcaacagagcaggtggttgctggcaagctataccgtcttactcttgaagttattgaagctggtgagaaaaagatttatgaagctaaagtttgggtgaagccatggatgaactttaagcagcttcaggagttcaagaatattatcccctccttcactatctctgaccttggcttcaaaccagatggcaatggatttgactggagatcagtatcaacaaataaccctgaagtccaagaagcagcgaagcacgccatgaaatcacttcaacagaaatcaaactcactgttcccctataaactcatagatataatcctagccagggcaaaggtggttgaagagcgtgtgaaattcgaactgctgctgaagctagagaggggcaacaaactggagaagttcatggtagaagtgatgaaggatcaaaccggcaagtatgagtagaagttgcagatagcttttgggttgtgtgccatgtgtgaatggatcctttatagtatatagtatactaaatactgctatgtagtgaaaataaacatggtgattgtttggctttaaacaagg

SEQ ID NO: 367 - DNA, 938 bp, Arabidopsis thaliana
  misc_feature (1)...(938): n = A,T,C or G
tttttattatatcgaccataaattgatttcaatcaaatttgctcagagaggaaaccgtcaagtaacaaatgtaaaagngctaacgagtcaatcaaaatatttctactttcttttctgtattctgtgttcttgcttctatcagaaatagaagaagtagctgtatacaacaaatcattgattctttcggatttgtaagatggaacgagaaagcaatttgattcaattcacagatggattgtaactgcagagaaccttacacttcacctttgaggagctttcacaaggacagagatatggagatagaattctgggttcatcaagttatttaccacccacgaaaacggtatctctagcttcatttctatcccttgtatccttaccaatttgatttcacccatctccctcgacccatctgcttcttctgtatcatctatgcttctttcttcaccactcgtttgcgctctgtctcccataaactcagggaggagacttttaatggcgtcacgtaacgtaaagcatttcccttcttctttgaggaactcaacagggcgattaaggtacgagatgtcatcccaggtatcgatctccggtacatcttcaagattctcgaaatctttatttagacttcgaacatacaaccgaacaggaattcttgctgaaaaaaaggattttacattaaatcaggacgctagtactttgtatcatgtttgccatcactgcaatagatgcaacaatttgtgaaaagtcattattcttttcctgttaagttnntgctgtttataggannnnncagaaaagnnannactactacttacaagcagtgtttttactaggtcctctgcataaaaatataccagtcccatcttgtgatactacttttccaaatatgggaaaatttgacaaggtgtaactgtctcagctgagtatatagttggcaa

SEQ ID NO: 368 - DNA, 937 bp, Arabidopsis thaliana
attatcacatcctatgttgacgtcacaaaacaaagaaattgttataggcttagggttcggacaagtgtggtcctaagcctatcttccgatcttaatccttctggaaccaaaacaacaacatcttgaaccataacctgactcaagcgcgacgcgttcgcgtgttgtacacgacaatccatttccattaacgcactcatcaatgccgacgtaggatggttcacattctctgtctgaaccctaattatggcttcttctccgacgatcttcacttgcacttccaagtcagagcctctgtttgattttgaaggtttctggttaacttggtactcaacggaagacggagacgtattgctgctgctgttgtctaatttatctgtctccgtcatcttcattttcttgatctcagtttcgagatcatcgattttggatttaagactttctatgtacgaaactgcgtcggataaaagtgacgctttgtccattcgtgacacttttggtacgatggcacgtagagcgtaaaaccggtggtttagcttctctctccgttgcttctccgcttccacgtgggacaaaaccgccggatgatgtttctctttcgtcgccgcagctacccttgtcgtctcaagtttcctcctccgttttctttccgacccgaattgctgatttccgcttttcgaatgatctgataccgccggtttagggtaagaaccggtttggttagtgtgttttgttgttttacccgacccgaatatggacttgactcggtttataaagttccggttttgtataattgattcagacgaaccaagttcgataatgccattgttgatgggtatggagaccaatgtgtgtaccccgtgaaaaccggcttctttagccctctcgtagttgctaaaccggagctcgtcgggaccggttaaccaaaccaaagattcat

SEQ ID NO: 369 - DNA, 937 bp, Arabidopsis thaliana
cggccgccttcactcttcatcttcaaagactgcgccttttagctcagtgaaaaaggttcgagcttcggaaactatggcagcattccctaaccttaactctgatgctggattgaagaagctcgacgagcatcttctcactcgcagttacattactggataccaggcttcaaaggatgatatcaccgtctttgcagctcttgcaaagcccccaacttcacagtatgtgaacgcttctcgttggtacaatcacattgatgccctcttgaggatctctggtgtctctgctgaaggaagcggtgtcattgttgagggatcagctcctatcactgaggaggctgttgctactccccctgcagctgattctaaggatgctgcggctgatgaagaagatgatgatgatgttgaccttttcggagaggagaccgaagaggaaaagaaagctgctgaagagagagcagcttctgtcaaggcatctacaaagaagaaggaatctggaaagtcctcagttttgattgatatcaaaccgtgggatgatgagactgacatgaagaagcttgaggaagctgtgaagtccattcagatggaaggtttgttttggggagcatcaaagcttgtcccagttggttatggtatcaagaagttgcagattttgtgcaccattgttgacgaccttgtctctattgacaccatgatcgaagagcaactcactgttgaaccgatcaatgaatatgtccagagctgtgacattgttgccttcaacaagatatgaggatggagaaagcttcaaggaatgtctgtgttcatgtggtctggttcttcttcttcttctatattcagtttcccaagtttttgtagactgttgttttgactctgttatggcctgccatctctgatccattttgatatttaatgaaaagtgacaattcagtaaaaaaaa

SEQ ID NO: 370 - DNA, 937 bp, Arabidopsis thaliana
cccgggcaggtctacttcaataaatctccaccttgctttaagaacaaagtcttaacaaatggcaggaatcaaagttttcggtcacccagcttccacagccactagaagagttctcatcgctcttcacgagaagaatctcgactttgaattcgttcatatcgagctcaaagatggtgaacacaagaaagagcctttcatcttccgcaacccttttggtaaagttccagcctttgaagatggagacttcaagcttttcgaatcaagagcaatcactcaatacatagctcatttttactcagacaaaggaaaccaacttgtctcccttggctccaaggacattgcgggcatagccatgggcattgaaattgaatcgcatgagtttgacccagttggttcaaagcttgtttgggagcaagtcttaaagcctttgtatggtatgaccacagacaaaaccgttgttgaagaagaagaggctaagctagccaaggtcctcgatgtttacgaacacaggcttggtgagtccaagtatttggcttctgataaattcactttggtcgatcttcacactatccctgtgattcagtacttgcttggtacaccaactaagaaactctttgacgagcgtccacatgtcagtgcttgggttgctgacatcacttctaggccttctgctaagaaggttctttaagtgactcacaaactgttaatcagaagattgaataaagtggcgatgacctcattgccctaattctcataaacaataaaagtggcgatgacctaattgccaaattctcatacactctgtgatttttttgtgtgtgtctcctctgttttttttttttggtttgaatgtaatcttcaataataatgagtcttgatatataataaaaatatatttggtagcctgaaaaaaaaaaaaaaaaaaaaaaaaaaaaaa

SEQ ID NO: 371 - DNA, 936 bp, Arabidopsis thaliana
  misc_feature (1)...(936): n = A,T,C or G
agcggccgcccgggcaggtggcgtttctctgttcgtctctcccaagttcatcctctatcgccattttcggcgacccaaacacagatggatcatcacgctcgtatctttcgattccttcattgaagttacggttccgtcccgtcgctgcttcctcacacatttgtgctccagcgatcgacaagtcgactttcgtcatatccgaatcggtgtcagaagatgagctttgggctgcagcttgtctccgcgtacgaaccttcaacgaactcaatccttctgcttacaatatccaagatcatagaagatacttggcagagcgtgaattcgaggcgcttaaggagagaacttcagggaagagggaagggtttacgcgggtcgcttgcataaatgctacccttccattgtcgcaattatcaagctcttttgaggatttatgctctgcatgtaagttctctgatggcatagaagacagagttgtggtgggaagccttgatcttaaccaatgtcgttggcttcctgatgaaattgctggaacaaaaccagaggggattggtgtggattttgctagagcatacttgagcaacgtctgtgttgcaaaagagctgcatcgtaatggagttggttacaaacttattgacaagtctaagagagttgctggagaatggggcataacggatatgtacgtgcatgtgacggtagacaatgaagcagcgaagagtctatacatgaaaagtgggtttgagcaagagaccgctgagccagcgtgncaagctcgatacctcaataggccacaacggctcctcctcnggctcgcccttcctacctccccaatcatgtccatgtaattgtaaattttccaatatatccaatatgtcaacctgtnnnnnnaatcaataaaagctttataactctcaaaaaaaaaaaaaaaaaaaaaaaaaa

SEQ ID NO: 372 - DNA, 935 bp, Arabidopsis thaliana
  misc_feature (1)...(935): n = A,T,C or G
ttcttctctaatggcgacgaccttaagcagagatcaatatgtctacatggcgaagctcgccgagcaagccgagcgttacgaagagatggttcaattcatggaacagctcgtaagtggagctacaccggccggtgagctgaccgtagaagagaggaatcttctctcggtcgcgtataagaacgtgattggatctcttcgtgcggcatggagaatcgtgtcttcgattgagcaaaaggaagagagcaggaagaacgaagaacacgtgtcgcttgttaaggattacagatctaaagttgagactgagctttcttcgatctgttctgggattctcaggttacttgattcgcatctaattccttcagctactgccagtgagtctaaggtttttttacctgaagatgaaaggagattatcatcgttatttggctgagtttaaatctggtgatgagaggaaaactgctgctgaagatactatgatcgcttacaaagctgctcaggacgttgcagttgctgatctagcacctacacatccgatcaggcttggtttggctcttaacttctcagtgttttactacgagattctcaactcttcagagaaagcttgtagcatggcgaaacaggcttttgaagaagccattgctgagctggacacattgggagaggagtcatacaaggacagtactctcatcatgcagttgctaagggacaatctaaccctttggacctccgatatgcaggagcagatggatgaggcctgaaggtctaatggaagaaaagacggttatgtaatgtacctgcaannntaaccgaaaatctgagttcaacctcctttgctgtaaaacttgtcgaaaagaaaagtttgtttttttatgacagattatgtgcacagctttggtgttatctgctgctctgtatcaactctgtttttggcggcc

SEQ ID NO: 373 - DNA, 935 bp, Arabidopsis thaliana
cttgaaaacttaagatgagattgatacataattcacattatatagtcgaaattgcaatggccactcttgaaaccaacggacaaggattcatctaaaagatcgaacgatcataaaccccttgatgattcgaaattacacaaacggaaattaaaaagacattaaaattcaaattcaaagtcgaataaaattacacaagagagaaaaagagagattaattcagtagtctgtggttgggagctgctcgtgcgtggtgttgatgaagaaaacttcgtagatgagtccagcgattccaccgccgacgagaggtccggcccagtagacccagtggttggtccatgtccagctcaccaccgctggtccgaaagccacggcgggattcatggaggctccagagaaagctcctccagctaagatgttggctccaacaatgaaaccgattgcgatgggagcaattgttccaagactcccgtttttggggtcaatggctgtagcgtagacggtgtaaacaagcccgaatgtcatcacgatctcgaaaacgaaagcgttcaacactcctactccagcagagagaccaaaagccggcacagccaagccaccggtggcgaatttaaggatgaggcaagcgacgacggagccgagaagctgagcaatccagtagaggataccacggaggagagtgatgttaccaccgatgaaagcaccgaaagtgacggcagggttaacgtgtccaccagagatgttggcaccaactgagacagcgacgaagagtccaaaggcatgagccagtgcggcagctacgagaccagaaggagtggtggctccgttttcagtgagcttgttgaaagccatgccagagcctgaaccggcgacgacaaagatcaaagttgaaatgaactcagccaaggccgcctttaaggcatcgggacgggttgctt

SEQ ID NO: 374 - DNA, 934 bp, Arabidopsis thaliana
tttttttttttttttttttttttttttttttttttttcatcgtttattcttttttttatatcacatgatgaagctcttttagaaccagtcagaaatattgtagcctaaaacgcaaaggtacgttacatatacattcacaggaacttacatacagagaagagaagatcacttatggtgctgcctcttccttttgcatctgttcgataagaggctcgagaatacaagactttggattcttacccggtggacctttttctcttcgttcaagctcttcaagcctgaaagtaatgagacggtcccagtttcctccttcgaacaagacaccagcttttccatcagtgatcctctgcacaattccacaatacatgtgatacggactgttctggttcttgactatagcaatcatccccggcatgagaaggggtagcttgggcgctttcggcttcttatctgtagcaaccgcggatgcatcgcttccttgttttgcaggtggtggtggtggaggaggtggtggatttttttcgataaacgtttttaaacccttttcgccaccgggaaatcctcctgtgagacccatcatctctttctcgaaaccatcttcaggtactttaaaagacaagttactgtcatcgctctctctctctgtctcgttgttctcagcctttgatgtctcttgctcgtcttcaatgttcctctggagctccttctcaatacctttctctccgttgcataatcctcttcctcccatcacttcccatagattgaatttacccatggcctttacttgatacagttttgactgctgttttggaggcgggaaaaccgaccggtttacagttgaaaattgatgtgtttggcctagaaattttgatcgatgaatcggagttctaatggtcgggatagtgatcgaagaagtcgccataactatttttgc

SEQ ID NO: 375 - DNA, 933 bp, Arabidopsis thaliana
tttttttttttgaaacaaacaaagatattcttattgtaagacactaatcaaaatgtaaattaagaaatggtacaaagtagtaagtattattttaagatccatagagaaactgtctacaacttagaagaaggtttcttggatccacgtccggctataaactcctgcatctttctaaactgttccttcgtcatcccactgtaatacgcgtgagctcgctccttttctagtgtgagagcatgcccaagatcaagcttaagtccatcattgataacggatttaatcctcagaaccatgccttgttcattcttgattatagcctctgcgatttctctagctttctttaacgcttctccttcttcaaccacatggtttacaaaccctaacttcccagccacgtctgctgtcagtggcatcgatgttaaagaaacttctcgagctttgtttgctccgatgatcctcgacagcttctgagacaaaccccatgaaggaaatatcccaaacctggcgtgagtatccatgaacttagctcctctagaagcgaccaaaatatcacaggccaaggcgagttcaaacccggcggtgatggcaaaaccgttaatagctccgatgatcggtttacgtaaccgctccatctgcacaaccgggtcggtttccggatccttcacgtctcctttgaaaacagactccgccgcagtcaaatcaacgccagagcagaaagatcgacctgatccggtgaaaatcacgacctggaccgattcgtcggagtccatatccttgaatgccttggcgagatcaaccatcatcgctctcgtgagtgaattgagagatttcggacggttgattgtgatgacggcgatcccgcctgattctttcttcacctgaatgagattttccgatactgtttgatccatttttcgacgattccggacgcgt

SEQ ID NO: 376 - DNA, 933 bp, Arabidopsis thaliana
  misc_feature (1)...(933): n = A,T,C or G
ccacgcgtccgattataattttcctttcaattgactcagtgagtcgccgatcgagttagaaatgggaatgggaagtaacggagaattgaagtatgagatctcccagaacgcgtacatcaaactcgttcttcactcgctgcgacacaagacggcggcggtcaacggagtcctcgtcggtagaatcagccctaaggacgacggagttgtagagatctcagattctgtgccgctctttcactctaacctcgctctccttcctcctctcgagatctccctcatcatgatagaggagcattatgtggctcaaggtttaagtattgttggatactttcatgcaaacgagaggtttgatgacgttgagctctgtggtgtggctaaaaacattggtgatcacatttctcgctatttccctcanncaccaattctcntgttgaacaacaaaaagcttgaagccttatcaaagggtaaagagcgaagccctgtgatgcagctctgtgtgaaggatgcttctaagaactggagagtagttggagcagatggaggaagcaagctactcttaaaagagccatcggccaatgtagttttgtcagattacatttcatctgagaaatggaaggacgtcacagatgttgatgatcatcttgatgatgtaacaaaggactggctaaaccctggacttttcaactgaagatgggtatgcgacatagctaaactagacttttgctttcatcatcttctgtcgaaaaacaaaaaagttctcggagaccattgtttaaaatttcccttgaatcttgttaaagtattatccagctatgcaacagagctcaaattacnnttaattggtacacatcttaaaccttagttatatcatttgaatgatatcttttggagcttgttacattttgattatatagttggaatgaagaaagctct

SEQ ID NO: 377 - DNA, 933 bp, Arabidopsis thaliana
gcaagaaggctctcttattccttttcaaaaacaataatattcaactcttgcaagttgcgaaacatgggagcctaagcgtgtaagaataacccactgaaactcatatattgcatgagatcactcaccttttaacctaatcctagacagacttatctgccttttaaaaaagacattttaaaacagaaacaaacactcttttattttgctccataacttgtgtattgcttccttcactattgcttgctcaagtttctgataacatatggaagtatgcctccatggttaaagtatgccaattccacctctgtgtcgaagcggactgtgcaagtgaaagattttccgttgtcggtagtgacggtaacatcttggccaggtcttatctctgagatatcggttgggagatggatcgtgtagcgttcgtgaccagtcaatccaagagtatctgcgtcttcaccggacttaaagcacaatgggatgattcccattcccaccaagttgcttcggtgaatcctctcaaaactctttgcaatcaccgctttaacaccctgtagcatgggtcccttggcagcccaatcacgtgagctaccacttccatactcagctccagccagaataattgtgtcttcaccagatgacttgtacctcatggcagcgtcaaagactgagagcttctctccagatggaatgtgaacagtcttagggccaacttcaccattcatgagcttgttaacgatacggatattagcaaaagtacctctggccattatttcatcattcccacggcgacttccatatgagttgaagtccttacggtcaacgccacgctccatgagaaactttgcagcaggactgtccttttggatgtttccagctggtgagatgtgatcagtggtgatactgtccccaaaattgagtaaacagtaagcatccttc

SEQ ID NO: 378 - DNA, 932 bp, Arabidopsis thaliana
cttttttttttttttttttttttggtccagaacataacttttatttgaccatatattcgaatgcacgagatgtgcattctgaatagtgatttaaaaatcatacaaaagaaagaaatagaaagcttgttaactctaaatgaccaaatggatgaaagagcaacaacatggtgatatgatatacacatgtattatgaaacttggtctcaacaaggtaacttgaaacccatgtaacgaccagagacataatcattccaaacatcaagagctccatagcttgtcatcaacacaatactcaatgccatgacgataccaaccgagaacacaatgatcgaagcccttccatactcggttattaccttttgaaccacctttagtcccacgagtgatgccacaaaacatatgaccgcaaatatacttgcggttccggtatgttccatgcctagtaataagtattgaatcgcagacattgttgatgaaaaaagaaccatgaaagaacatgtcgctgcagttacctcgggagcgataccgacttgaagaagaagaggactaatgagcattccacctccaataccgaacacaccacccaaaactccagctaatagagccattacagggaacatacacttgtttgatcttgctccatcatttgatctcaaatcttctacatcctttactgagacatggtaatctgattgttgttggctttgaacattgtcactgaagcagatccagagagtgaagaagagagttagtggtatttgagacgatgaaatgagccagtaggcgtttccacatggctcgatcgatatgattccctcgccatatttgtttcctcgaagaagataaactgcgaagtaagaaagccaaataatgaccaaaactccaagcttaatccatggaaacctctttggtctctgataatcctccaagag

SEQ ID NO: 379 - DNA, 932 bp, Arabidopsis thaliana
cttttttttttttttttttaatataatgtatataacattaccattatacgcaaattattaagcgattagtacaacttagaatgtaagaaggtatacaagcaataaccggaaactttatgtcacaatttacggttactttaaccatcagtctctatatgctcactcatgagcaaaagtttttaagcggcaagcaacttctggatgtctttctcgatttggaaaggggatgtggtgggagggtacctctcaacgacctttccctttttatcaatcaagaacttctcaaagttccatttaatgagaccacccaagaatcctcctgcgtttgatttcaagaactcgtagatcggcgctgtgcttggtccattcacgtcaaccttatcaaatatagggaactctgctttaaaccgggtgcaagcgaattgtttgatctcggagtttgacccgggctcttggaaaccaaactgattgcagggaaaagctagaatctcaaatccttgagttttgtatttctcgtacagatgtgaaagctctgagtaatttgatgatgtcaaaccacatcttgaagcaacattgacaatcaacataactttccccttgaatttgttcaaagcaacatccttcccatcaatgtccttaacggtgaaatcgtgaacggttttttctgcagcagctctagcttggacagtgaaaggacgagacttgaagagaaacccaggattaattggagattttagagaaaacccattactcagattcgcgaaattcgatattccggtggagaatttcaaggaagggacgagaaaggttgctgaggaattaggtctagaactgttgaagactgtagagaatgttccgtacgaagaagatgaagtagtcatggagacgagtttatgttcgtcttctttcgaccagtgttaccggacgcgtgg

SEQ ID NO: 380 - DNA, 931 bp, Arabidopsis thaliana
  misc_feature (1)...(931): n = A,T,C or G
tcaaaggactaactactaaggatcagtagatgatacaaaaagttttactacttaaatcagttctaagagaataataatcacaagtttaacaacacattgttacactctaatcaaatttcacaaatgtttttcttcttttcatctcaaatttcacatttccactaatcagacaccaattgtttaagcagagattggttcgtatggatatgaaagccaagggtgcttcagagcctctgctgcagaaggacgcttctttgggtttatctcaagaagatgagccacaaagtctgtgaatccttggtctcccattggcagccgatgtctcaacgatgttctttttggtatcaggtactccaatctgttgctttcctggttccgctcatagagcattcggttttttgtgaagtatttgtggnnnncncgtncntnnnnaagcatttcattatcgaaagatcctacgattcccataacccttgctagcaaactggctggcgaatcattctggaagagaacgttgcctgtacacagttcagccaaaatgcacccaagagaccacacatctatctttttatcataaggaagtcccaaaatgacttctggtgctcgatatgaccttgactggacataggagcataggtggtctgtctcgaaacagctacttccaaggtcaatgacctttatttcacatctgctataacttttaaccaatatgttctcaggcttcaaatcacagtgtataagtccaaggccatgtagaaattgaagtgattcgagacactggatagtgattgactgcaatcttggcatcgtgaaataaacttcaccacctgattctctgttaaatttgtggaattcgtatagattggccttaagaaattcacatacaattagcaagtgctcgcggtagtaaaagtaatcatacaaccgtaga

SEQ ID NO: 381 - DNA, 931 bp, Arabidopsis thaliana
attttggcgaaacccagtgagagagagacagagagaaaggagggaaattccagcttcccttttctctctcgttcttgctcttttgatctgcgtgaaaagaaagaatttttattttcccgacagagaaaagtcccaatttttaaaattaggactttttgattttcgaaaattttggtgttaatggaaacagatagtatcgattccgtgatcgatgacgatgagatccatcaaaaacaccaattctcatcaaccaagtctcagggaggagccaccgtggtaatctctccggctacaagcgtttacgagctccttgaatgccctgtctgcaccaattcaatgtacccaccaatccatcaggtgtttcaatgttttggtcaatacttttgtcttcattttgaagcgtttcagctcggtatggctccagtttacatggcgtttctgagattcatgggcgatgaagatgacgcacgaaactatacatacagtttagaagttggaggcagtgggagaaaacagacatgggaagggacaccaagaagtgtcagagatagtcacaggaaagtcagagacagtcatgacggtcttataatccaaagaaacatggcactcttcttttccggtggagacaagaaagaactgaaacttagagtcactggaagaatctggaaagagcaacagaatccagattctggtgtttgcataacctctatgtgtagtagctgaatcaaaatcagccaacccttcaaacctatcttaaggtgttcgttcgatttcttcaattcgattttgtttcgggtttgtgtgttgttttggtccagaatccagatagcttctttacattcaaaagtgtatttagagaagtaaaaagagttgttccatttgccagaaatgtgcagaaggtcacaaaagttgcaataacttccaaagattg

SEQ ID NO: 382 - DNA, 931 bp, Arabidopsis thaliana
cttttttttttttttttttttttttttttttttttttggtaggaaaggaaattttataagtcacaaatccgaaaggttattgaatgacatgggagccaaaagattctcttacacaaccgactaaaatgtgacatgatcctcaatctaacagacaaaagtaacaagttttgtgacacaagctgataggtaaattacccaaattgagttttttcaatcaaagacgagcgatgactgcttcgacttcttgtggagtgtagagatgataagctggtgctaccttggcaatatccacgttatttggagtcaccttttcttccataacttgctttaggatagatacagcgatagtctcagcttcttgtagagacaaatctttgttgaattgctcttgaagagagctatcagctccttcagaacctgaaccaattgcctttgcattgcactgccagaatgttcctgaaggatcagtgtagtacaagcttggtccattttcatcatggccagcaatgagaagagatactccaaacggccgagacattgattcttcctctccttcaccaaaccgtaaagccagatcacacagtgcttgtgttgtggactctacagtcatcggctcaccatacgagaatctatggttttgagtttcaactctagcatgctcaacaagtgtgcgcgcgtcagcaattaaaccgctcatagcacaaccaatatggtcatcaatttccataatcttctccacactgctcggttccagcaatggcgacgtgatacgcttctcgacagcaagcacaactccttcttttgtctttactccaattgcagtagaaccaagcttgatagcttcaatggcatattccacttgaaatagccttccttctggagaaaaagtgttcactcctctgtcatactcagttctagtgagaaacatctt

SEQ ID NO: 383 - DNA, 930 bp, Arabidopsis thaliana
aaggagagactaattcatgtttatcctcatcaaaggcaaatgagggacaaggtagtatttaattacaatacccagacgacaaaaccaagtttttttttcaaatttacaaacccttgcttacttctatacctaatttgacccatttttttatttagagactttttttttctactggggagaaacagtgaataaggtatattcactcactcgccagcagactcacctgcattcattcttcgccatcatcatcagtagacagaaatgtcgacgcttatgcctcccatggaaagatttttcccagaaagcttttggtcctcacgcaagcccagccacagacacgatatcctcgccatcgcagcctgccccaccactttcaccctgtacaccatgctcagatctgcagctgccgcccatagctcattcccattaactttcactgacctccgtgaccgtgagtcatcatcattatagccctctagatccgagtgggtgactacaaccattgacccatcatcaaacaccactacattcccagaacaaacctgcttcacatttctcgggatcaaagctgaagttgcatcagttaagcaactctgagtattcagcaccttgacatggtagtactcaacaacggccttccattgggctgctgctaaaagaaccctgggcctgattgatctcacgtaggaatatgctgcttcaggtgtcatgtttttgtgttgaaccaagtagcatatgacaatagttgtgctgcgaccccgacccgctttgcagtgaacataagtcgtctttccaagcgaagcatttctatggataaattctacagcttggcatattgcttccatggaaggagcaaaacaataatctcttgtagcaatcaccaggtggtcaatgcagtaagatttgtagagagacgatggaaccaaagtt

SEQ ID NO: 384 - DNA, 930 bp, Arabidopsis thaliana
  misc_feature (1)...(930): n = A,T,C or G
cggccgctttgtgtccaactggtcttttcaaggatgcgtgaaatagaaaaaacatatgaagaatggagtttggtcagtttaaaatcttgaaggaaagacaaaacaccaacgaggaaattaacagaaccattcttcagtggagtttgtctcagcggttctgaagagtctcgattgcctttttccacactgaagctctctgttttgcgtcttcaaatgataaaaccttctttggcgtgcaaatcttgaaatgtgaagggctagtgactacaacgttgaggtcattcgagttatcagaccatataatgtttcctttcacaactagttttgacgggtcgacatagatcagcttgggtttgttggtgagtattagctgcaccttcttgctcgttattttctgaagcttcttcaccgctgatatcatcagaaccgattctcctggctctaaaaactgttgccatcttgaatcaaaagagtctattgaagcaagtcgagttatggaacccgatgattcagaagatgtaggaggagcactgtgcccctcgttctgtgtggctaaagaatctccaatatgtgtcaggttccatggagaaccatgtgtgtcatccctctcgggagatgctgtctgagacgcaggatctggagctagttttggaggagtctgggaccttagattcttccagtcaactccattaaagaaaggatgtctcttaagagcaacatannnntctgnnncagcacctggccttctgcttggctcggtatccagcaaccggtcgatgaggtctcttgctgcttctgaaaaatgatttgggaactttatatctctggctataattctttggaaaatcagccattcacttgcatctttaaatggggaagtccccgaaagcatctgatagagagtgcagccgagagcccaaagatcattcc

SEQ ID NO: 385 - DNA, 930 bp, Arabidopsis thaliana
ccacgcgtccgatttcttcactgcaattcacaagcaaccttcaaactaaaactcgagagacaagaaatcctcagaatctttaacttaatggcgctcgaggctcttacatcaccaagattagcttctccgattcctcctttgttcgaagattcttcagtcttccatggagtcgagcactggacaaagggtaagcgatctaagagatcaagatccgatttccaccaccaaaacctcactgaggaagagtatctagctttttgcctcatgcttctcgctcgcgacaaccgtcagcctcctcctcctccggcggtggagaagttgagctacaagtgtagcgtctgcgacaagacgttctcttcttaccaagctctcggtggtcacaaggcaagccaccgtaagaacttatcacagactctctccggcggaggagatgatcattcaacctcgtcggcgacaaccacatccgccgtgactactggaagtgggaaatcacacgtttgcaccatctgtaacaagtcttttccttccggtcaagctctcggcggacacaagcggtgccactacgaaggaaacaacaacatcaacactagtagcgtgtccaactccgaaggtgcggggtccactagccacgttagcagtagccaccgtgggtttgacctcaacatccctccgatccctgaattctcgatggtcaacggagacgacgaagtcatgagccctatgccggcgaagaagcctcggtttgactttccggtcaaacttcaactttaaggaaatttacttagacgataagatttcgtttgtatactgttgagagttgtgtaggaatttgttgactgtacataccaaattggactttgactgattccaattcttcttgttctttcattttaaaaattattaaaccgattctttaccacataaaaaaaa

SEQ ID NO: 386 - DNA, 929 bp, Arabidopsis thaliana
  misc_feature (1)...(929): n = A,T,C or G
tttcacttcactttgtattaggatttatcttgagaatcagtacaccatttatttttaaaaaggtacacaaacgaaccttattaaacacacaacacaataatttcatatatatatatgactttcagacctcaaagagttgactttttgtttgcattaggagctttgacataagcaaccagggaagaatctccggttctagtcaatgtcttgagctcgtagcccaaccaacacctcgaactctttctattgtagaaaaaccctaaacatttgcaatctctcgtacacttgtccccacacgcactctccgtcgtcgatgatccaccgttatattttgtcatgaaactatcagctccttcgatcttgaagtagtgaaatgtcttgggatcgcaacttgcgagacttggagatttacatgtctcgtcccaaccaagaagccctttgtcgctaggacaagcgttacactggcctttcttacacaaaccaaaccccaaacaatgctcagggatcctacactcgtcgttaccgtcagtgtcggcgttggtaaacgcnntgtatgtcacgtcccaagccgtggaagtcgccaacgtactgtaactccaaactctgatgtttccgtctgattctaaccgaataaaactcaacgtcgcgttgtgtttcggccgtgagaggaacgttgaaacgttgaatttagaaccagaatcgacaccttccatgactagaccccacgttgtgtcggaatcttccacagcttggaacgtcattgactggaattgtgttatcttggtgaagaattcgtattcaaaataagcgattggtttcggagttttgtttgtcgtgtagtacaagactagcttcttggcttccatcacgagactgtacggtccgtttgtgttgacagatggagacagtctgcttacgagtttggtccg

SEQ ID NO: 387 - DNA, 929 bp, Arabidopsis thaliana
  misc_feature (1)...(929): n = A,T,C or G
caggttcagcagttcctctcctctgccctctcccagcgcggcccatcttcagtcccctacgaagagtccaacaagtggttgatccggcaacatctacttaacctaatctcttcttacccttccttagagcccaaaacggcatcgtttatgcacaacgatggccgctccgtcaacctccttcaagcagatggtacgattccgatgccttttcatggagtcacctataacatacctgtgattatctggctcctcgagtcatatcctcgtcatcctccttgcgtctatgtgaatcccaccgctgatatgatcatcaagcgacctcacgcacatgtcactccttctggtctcgtttctcttccgtaccttcagaattgggtctaccctagctccaatctcgtagatctcgtcnnnnatctcagcgctgcttttgctcgtgatccgcctctttattctcgacgccgtcctcagccaccgccaccgtctcctcctacggtatacgattcgtctctgtcacgacctccttcggctgatcagtcattgcctagaccgttcccgccatcaccttacggcggaggagtaagtagggtgcaagtgcagcatgttcaccaccagcagcaatctgatgatgcggcggaggttttcaagagaaatgcgattaataagatggtggagatggttcatagcgatttggtttcgatgaggagagccagagaagctgaagcagaggagctgctgagcttgcaagctgggctgaagagaagagaggatgagcttaatatagggttgaaagagatggttgaggagaaagaaacacttgaacaacaattacagattatctccatgaacactgatattctagactcgtgggttagagagaaccaaggcaaaaccaagaatttagttgatttggatgtggataatgcttttga

SEQ ID NO: 388 - DNA, 929 bp, Arabidopsis thaliana
  misc_feature (1)...(929): n = A,T,C or G
tcttctttatcacactgttacgcttggattctcatttcttcaagttcataacgctcggatcaatcaggaagacgaacttgaactttctttttttcatcattacccaaagctatgaggctcacaccaccaatagctccgccgtcatgaatccttctcttccaggtcaacacaagtcagagctccaaaaatggagtcatgcgattgttttgagacgcatgtgaatcaagatgatctgttagtgaagtaccaatacatctcagatgcgttgattgctcttgcatacttctcaatcccactcgagcttatctatttcgtgcaaaagtctgctttcttcccttacaaatgggtgcttatgcagtttggagcctttatcattctctgtggagctacgcatttcatcaacctatggatgttcttcatgcattccaaagccgttgccattgtcatgactattgctaaagtctcttgcgcggttgtgtcgtgtgctaccgcgttgatgttggttcatattattcctgatcttctcagtgttaagaacagggaattgtttctcaagaagaaagctgatgagttagatagagaaatgggtcttattttaacacaagaggagactggtaggcatgttaggatgcttactcatggaattagaagaactcttgataggcatactattttaagaaccactcttgttgagcttggtaaaactctttgtcttgaggaatgtgcgnnntggatgccttctcaaagtggtttatatttgcagctttctcatactttgagtcataaaatacaagttggaagcagtgtgccgataaatctcccgattattaatgaactcttcaatagcgctcaagctatgcacataccnnattcttgtcctttggctaagattgggcctccggttgggagatattcacctcctgaggttg

SEQ ID NO: 389 - DNA, 929 bp, Arabidopsis thaliana
tacattgatgcttactattaaggagaaagatctacactctgtgaaatccggtacatgtaacgctagttgcatcaggttttatctcgctaagcttttgagactttctggatatgatgcagctgtatgttcagctagatggcaaggtggtggcaaagttcctggtggagataatgagtatatagatatcatattgagtgatactgaagttggtcaagatgatcgtttgattgttgatattgatttcagaagtcattttgagatcgctagagctgtggattcttaccaacggataatggaatcacttcctgtggtttatgtaggaactgttgcaagattaaaccagttccttcaagtaatggttgatgcagcgaaattctccttaaagcagaattcaatgccgttacctccatggagatctttgaactacctgcgatccaaatggcattcacctcacaaaaggcatctcggtcctatcgatcaacaaggtcctggaatgttctcaccgggattacatggacagtgtgctgagaatttaaagaggcttcagtttgctctccaggttgaacaagaggccgagagattcatgaagaagaagagcggttttagccgcaggaactaacccgagataatgagaattcaaggggctcgtgctccttaaagagattgtacagatgttttttggaggcatcaagaggccaaagaattttgctctgttgagtcgttttcgagtgtaatatttttgcggctgcgtctttttttctttttaatatggattcatttggggttacaataacagccaaggttaggctttatacaaagaagataatatacgaaaggtaccgcaatttttgccgctgttgtatgattcgacattgggagagattgttctaataagcatgtttctgtttggggttcttttccccgtgtta

SEQ ID NO: 390 - DNA, 929 bp, Arabidopsis thaliana
ccaccaccggcgccgtttttcgaacccggcgagctcaaatcttggtctttctacagagcagggatagctgagttcatagccactttccttttcctctacgtcaccgttttgacagtcatgggtgttaagagagctcccaatatgtgtgcctctgttggaatccaaggcatcgcttgggcttttggtggcatgatctttgctcttgtttactgtactgctggaatctcaggaggacatattaatccggcggtgacttttggtttgttcttggcgaggaagctatctttaaccagagctctgttctacatagtaatgcagtgccttggagctatatgtggtgctggtgtggttaaagggtttcaaccagggctgtaccagacgaatggcggtggagctaatgtggtggctcatggttacacaaagggttcaggtcttggtgcagagattgttggaacttttgttctggtttacactgttttctcagctactgatgctaagagaagtgccagagactctcatgtccctatcttggctccgcttccaattgggtttgctgtcttcttggtgcacttggctaccatcccaattactggaactggcattaacccggccaggagtctcggagctgccatcatctacaacaaggatcatgcttgggatgaccattggatcttctgggtcggtccattcattggtgctgcgcttgctgctctgtaccatcagatagtcatcagagctattcctttcaagtccaagacataaagtttcctacatattctctgatcatcatcaagctaagaatatatcaatctttaattctatatgctttcttcttgtttcctatgtcatgtgtgatgatctctatatgtaccactagagctttgatcttgtaacagtgtaaatgtgtaatctattatgtatcaatggca

SEQ ID NO: 391 - DNA, 929 bp, Arabidopsis thaliana
  misc_feature (1)...(929): n = A,T,C or G
actaaacaagaagctttagccatcgatttcataagccaacaccttctcacagactttgtttccatggaaactgatcacccatctctttttaccaaccaacttcacaactttcactcagaaacaggccctagaaccatcaccaaccaatcccctaaaccgaattcgactcttaaccagcgtaaaccgcccttaccgaatctatccgtctcgagaacggtttcaacaaagacagagaaagaggaagaagagaggcactacaggggagtgagacgaagaccgtggggaaaatacgcggcggagattagggatccgaacaaaaagggttgtaggatctggcttgggacttacgacactgccgtggaagctggaagagcttatgaccaagcggcgtttcaattacgtggaagaaaagcaatcttgaatttccctctcgatgttagggttacgtcagaaacttgttctggggaaggagttatcggattagggaaacgaaagcgagataagagttctccgccggaagaggagaaggcggctagggttaaagtggaggaagaagagagtaatacgtcggagacgacggaggctgaggttgagccggtggtaccattgacgccgtcaagttggatggggttttgggatgtgggagcaggagatggtattttcagtattcctccgttatctccgacgtctcccaacttttccgttatctccgtcacttaaaacttcggaaaagtcaacgtacgatgacgttttcacttgcgtcactctcatgatnncatttattcttgtataatataaaggtagcggtagtgtgcaaatatcaaataagtagtttaattagtaccaatcannntattcattattttttttagtagaatatttggatgttgaaaatataaatttaattttgtatttgttgatgttataaa

SEQ ID NO: 392 - DNA, 928 bp, Arabidopsis thaliana
ctttttttttttttttttatacaaaaactccaattctaagaaagaaactgtgatttatccattccttgaaaattcgatacaaattttcaaggaatggataaacacaagtcaacattacaaaacaaaacagagtctcttctctactagttcttgggaatgttaactccgacgattttagcgggagtaatacgaagaagattcccaggcttaccaggcaaagcacctttgatcatgacaacattaagctccttatcaactttaacaatcttaagcttcctaatctttgtcctcgtccctcccattcttccaggcatcttcttccctttataaactcttcccggagtagtaccagcaccaatcgaacccaaagctcgatgactcttggaaccatgagtcatctgacctctcttgaaatgatgccttttgattcctccttgaaaccctttaccaattgtggttccagctacatcaacgagatcaccttctttgaatatctcatcgaacacaagcttctggttcggttcgaatccttcgatgtttgttaatctgaactcttggagatgtctcattgggattgtaccggctttttggagatgaccggtttccggtttagttagctttttgtcgcgtacacgacggtaaccgatttgaaccgcgtcgtaaccgtctgtggctagggttttgatttgggttacgatgttaccttcgcggaatccgacgactgttactggaactactgtgccgtcttcttcgaagaaactcatcatcccgagttttgaccccattactccgattccagcttccatggatgatgaaaccacgaatctggtttttggtgatgatttgatgagaagtgaagaggatttcgccgggaggaaagtgggagtgaagagtgaagaggataaggttgttttgttgagcagagatg

SEQ ID NO: 393 - DNA, 928 bp, Arabidopsis thaliana
  misc_feature (1)...(928): n = A,T,C or G
cctagagatagatagaaccaaaacataatgaactttgtttggtaaacaaaacagctgcaccataatgaatgacatgaacatgttccctaataagtatctcctcctcctcctccttggtcgtggtcgtcgtgaaactctttgaggacattgagaatctgagcnnccattctcctgacacgagcaagcaatcggttgcaggatctgaggtaacccttgacgttgtccttttggcatttatcaatgtaaacctccatgtccctgagaatctccatgagctcatcaaccacctgagaatactccatgacccgaccagggtctctctcaaccacctcctccaattctctcctggcagtttctaaccactcggcggataaacgaatccgggctttcaaggagtcgtagctgtcggagtcgaaaacgtccaagagtttcaagacggtacctggcttgattttgtagaagtgaagagctttaacgtaaccaggcttgctctccaaaggaagctctttgatagcgccttcttcttccaaatcgaggtggagatcaacgggggaggtgatgataggagggtattggtgtagacggaagaagaaccaggcggaagcagcgacggcgatggtggggatgatgaagtggccgcccccgccgaattgaggaaggggatgtttaacaggaggagaaggaggttcagaggaggagggagaagtgatggcgaagagggagatagggttttgaaggcttgaaggtctgtaatggtgaaagtgcgggatgatgctgttgtgatgcatctggttacagaaatatgctttcactaaactccccatttctctctttctctgttgttgtttcgacaaatttttatgaaccctaaacccccaatttcatcgaacccatttttgatttcgccaacagatttcgcccgtcggaa

SEQ ID NO: 394 - DNA, 927 bp, Arabidopsis thaliana
  misc_feature (1)...(927): n = A,T,C or G
tcctcgagacgtttgaatctccctcttcaatattcaatcccgtacaaggtgttacggagtaggagtagaagattaggactcgtcgtcagttctgtttcagctcccaacgttgagctccgtactggacctgatgatctcatttctaccctcctctctaaggttgcgaatagtgatggaggtgtgacgctaagccctgagcagcacaaggaggtggcacaagtggccggagagcttcaaaagtactgtgtcaaggagcctgtcaaaaatcctctcatttttggagattgggaagtggtgtactgttctagaccaacctctcctggtggaggctacagaagcgtgataggccgtctcttcttcaaaacgaaagagatgatacaagccatcgatgctcctgatatcnnnaggaacaaagtttccattaatgcttttggttttctagacggagacgtctccttgacagggaagctgaaagcgttggacagtgagtgggtgcaggtgatatttgagcctccggaaatcaangttnnatctttggagttcaaatacgggttcgaaagcgaagtgaagcttcggatcacatacgttgatgagaaacttaggttgggattgggatctaaaggatcattgttcgtctttagaaggcgtcaataatatatacgtttctccctcgtgcatcaaccaatgcaaatcactacagaaaaaaaggaaacaacatatggggtcctgcgagagtatgatggtcaatatccacaatgctgtgtacacaaatggtgttttagatataactttgttgtaatgtaaacttcattttaagagtgtctcacttcagatgagttgttgaggaagctactggtgaacttcaacatcttttcgcaaagaattactatagcaacaaagaaagataaatgacttagcagcctttat

SEQ ID NO: 395 - DNA, 927 bp, Arabidopsis thaliana
gtgccggaccattaacgctaatgctatcgccgcaccgtcgccttcgggattgatctttaacgggtttcgtgatttcgtcccgattgaaaagaggcttgttatatcaagctttcgtggcttgaaactaccgtcgaggacgacgaagactattacgagctctgactggagttggagttataggtctccgggaagattggcgtctgcgtctacgtctacgtctgcgtctacgtctacgtctgcggctgtaacatcgaattctacgaatagatttgaagctttagaagaggggattgagaaggtcatttatagttgtcgatttatgacgtttcttggaacattaggatctttgctcggatcggttctctgtttcatcaagggatgtatgtatgttgtagactcgtttttgcagtattcggtgaatcgtgggaaagtgatattccttttggttgaggccatagatatatatctcctaggaactgtgatgttagtctttggattgggactttacgagttgttcatcagcaatctcgatacttcagagtcgcgcacacacgatattgtttccaataggtcgagcctctttggcatgttcaccttaaaggagcgacctcaatggttagaggtgaaatcggtaagcgagctgaaaacaaagttgggacatgtaatagtgatgctactattgattggtttgtttgacaagagcaagagagtagtcataacttctgtcacggatttgctatgtatctctgtttctatctttttttcttctgcttgtctcttcttgctctctaggctcaatggttcacactgaggagttaatggtgttgtcccaaaacaaaagaaactttgtatgtgtataatgttttagcaacgctccatcttctctttttgttcattatatattgtttctctctgactttgattttg

SEQ ID NO: 396 - DNA, 927 bp, Arabidopsis thaliana
gattccgaagacgattgagaatacaagagaatctgatgaaactgtttgcagacctgacgatgaagaattgtttgcggatattgatgctgatgagtttaatccagttctgagacgtgagattgcacctaaggtcttgctcacaacatgtcgtttcaattccactagaggacctgctttaatacctgagttgctttcggtgataccaaactctcattatcaaaagagaggaacctatgatttgaagaagattgtagaatacgcaacgaagaaagattttacatctcttattgttgttcatacaaatcgtagagaacctgatgcgcttcttatcatcggtttgccaaatggtcctactgctcatttcaaattgtcaaatcttgttctaaggaaggatattaagaatcacggaaatcctacaagccatcaaccagaactggttttgaataactttacaacgcgtttagggaatcgtgttgggagattttttcaatcactcttccctccggatcctaatttccgtggtaggagagttgtaacattccacaaccagcgtgactttatatttttcagacatcaccgttacatatttgagacaaaggaaagcaagagtgataaaggaaaagaagagacaataaaacctcgtcttcaggaatgcggtcctcgattcacgcttaagctagttactctacagcatggaacttttgacaccaaaggtggagaatttgaatgggttcataagcctgaaatggacacgagcaggagaaggttcttcttataaattctgctgtcttccgagtttcaccaagttttgtgtttattttgcattttcgaattttccctacctccgtccaaaattgtatgtctttaaaacttctcatttcttttttcaatatagccatgagccatcgaaacaaaaaaaaaaaaaaa

SEQ ID NO: 397 - DNA, 927 bp, Arabidopsis thaliana
atagtaactttgataactttttaaaaatataaaattctgataaatctctcatgcagatgatcaacgagtcagagccagtttctgtttctggatttccgagggcaatttcacgtcagtgctaacccgagaacctcaaatagtcgaataagataccaagttatgtctatctgccaccactccaatccttgcctcgccgatgactcaaaggcgtggtgattattgtgccaactctctcccattgtaaataagcttagccaccaaacgttacgagatgtgtctttagtcttccatgatctcgaaccccaaatatggcatgccgagttcacgagccatgtcacgtggtacccaatcacacctccaacgcccccgccgcatgtaaggtaaggtaaaccaccatagagatagaggacagtccaaaacattaagacgtggaaaccaattgtcattcgtagaaaccaatagaaccattgctgcttcaagtccatcacgttgttacgtcctccacacttatatttgatataacgagtgtcacatatccaccacacatgactgaaccaaaatccttcgatagggctatgtgggtcacggtcagaatctgtgaactggtgatggaacctatgtatgctcacccaatccaacggatcaccctgaagagcaaaaacagcaaaataagctaaaggatattcaagccatttcggaagcttaaagctccggtgagccaagttcctatggtatgagaatgtgatgctgagtgaagtcaatgcgtagagcacgaaaccgaaccgtaatgcttcccatttgtagttaaatggtgccaagagacacaaaaagtgcacattgataacggttaacgctcgtattatatcggcccacgaccattctctatgaatatacggccttttttccttactcacggcgccgcggccg

SEQ ID NO: 398 - DNA, 926 bp, Arabidopsis thaliana
  misc_feature (1)...(926): n = A,T,C or G
tctttctctttttccgattctgattctattttttcttcaccaaccacacaaaacaattctacgtttgatctcttcttctttctccgtccaaattaatctctacgtttaatttctcttgttcaatcatgggacacgaaacaatgacgccggcaacaacaacgctcgtgttcacgtacggaactctaaagagaggattctcaaatcatgtcctgatgcaagatctgatccgatctggtgacgcttctttcaaaggtgtttaccaaactctagacaaatatcctctcgtctgtggaccttaccgagtccctttcctcctcaacaaacctggatcgggctatcacgtcaacggcgagctttacgcggtttctcctcgcggtctctctcgtctcgacgagctcgaaggaatcagtcgcggtcattacatccggcaaccgatacgtctcgcggcggcggaggaagaagaagaagaagaaggagatctggaaacagaggcgccgtcgtcgtgcgtggtggaggcgtattacgctcataagagttatgaggaagagctgtggaggaggaannnaggaagatcattcggcgcgtacacggaaaacgaagcgcgtggatatgtgaaacgcaatgataggcctcagcatcttagnnncttggatcatatccgtattttcgtatcttctccatgtgattgatttttatttctttcgtggtctctcccgctcgtcgcttttctatgtttgtttgtttttttctcgggacaaaagaaacaannnaaaaannncaaacacaaactagttttacaacttgtaagggtcccaccagtccgtccgtccgtcgtctccgtatcgatttgattagagagattgttgggtgtaaaacttatgattcccatcttaaataagttttaggttgtttttgaaaaaaaaaaa

SEQ ID NO: 399 - DNA, 926 bp, Arabidopsis thaliana
aacttcgtagaaaaaggaaagaaaattaaaagaacatgaatgacaaaagcatataaagaaaaactggaacttcaaattcgaattacataaaaatttagacctcgagctgagatcacgtcaaactagattgttactacatatatcctctctcattgtttgtaaccttgcaagtcttcccaagaaatactcaaacgtgtatggatatgacgaatttcacgtaagctcgtatatcttccttacaaaggcctagtatgtcgtcctcttgcccggccgcacaaacgcgaattcttcgggatagggtactcatctctcaaagacgtagatgacgtgaagacacgtaagtaaagttgttgtcccaagtactgtcttgcccaaaattctgatcttaagttccacattccaacgttgtctaatgcaatgtatatggctgtccatgattttgggtacacttggactgtggaacgtgaaactgcatcgcgtaaattataaccatttctgcttcctgtcttccactgtccaccatccatcccgaccacccaaaaggagtaaccattgagatgataactttggacgatatcttcttggttctcgaatacaatctcgataaaggttcgatagtcgacttgcaaaactgaggtgtcaaggtataaacctccatatgtgggtttgtctgagatgctgttgatcttatagacaccgctaatcttgaagaagtcagccagttttagaggggtatcagctggcacaaatgacacactattgacaccatatctttgtttcccgtttatctgtccggctgaactaccgaacacaattgtcctaatgagcggtataagaccataatggtatgagccttgcgggtttggtcttggtccactagctgtcaaattggttctgatggcacgtgcttggttcaaggaccaatc

SEQ ID NO: 400 - DNA, 926 bp, Arabidopsis thaliana
ccacgcgtccgccctaaaacatcccgcttcgctgctcaggaccaagaatctcagattcaactgatctttgcaacatgacgagggtttatgtcgggaatttggacccacgcgtcaccgaaagagaactcgaagacgaattcaaggccttcggtgttcttcgcaatgtctgggtagctcgtagacctcctggctacgcattcctcgagttcgatgacgaaagagatgctttggatgcaatcagcgcattggatcgaaagaatgggtggcgtgtggagctttctcataaagataaaggaggtcgtggaggtggtggtggtcgtcgtggaggtattgaggattccaagtgctatgagtgtggtgagcttggacattttgctcgcgagtgtcgccgtggtcgaggctctgtgaggcgtagaagccctagtccccgtcgtcgtaggagtccagattatgggtatgctcgcaggagtataagcccgcgtggaagaagatctcctccaaggcgtcgcagtgttactccacctcgccgtgggaggagctacagcagatcccctccttatcgtggttcacgccgtgattctcctcgccgcagagactcgccctatggtcgacgttcgccatatgccaatggggtgtgaaactggaccctgaagagaaagaagctattactaagctatgatgctatatctactctgtggcgccttttaggatagatctttatatctgctattatggtattagctcttctaggtttggttgttgagcatggacatgtcatggtatgttcgagttttattagacaattggatttggtgagttctccttcatgctgttttccaacagccgtcttgacttattctctataacacgcactggcctgctgtcttcacacagcgtccttgaacccctacacttgaggtcgttct

SEQ ID NO: 401 - DNA, 926 bp, Arabidopsis thaliana
gaggggcttagatttgtgctttcgagaagtgctttgatctctcttctccattttcacttctaatcggagatttctcttagggttttgttattcgttgagagatcgaattaaaaacttgtgaagaaatctctagggatcgtaatcgttgttggtgtggggtattacactgattccggtttgaacctgaatcgtatctatcaatcgatggcatcagaggatgtgaaaagaacagaatcagcagctgtgtcaacgatcgtaaatctggcggaggaagcgagggaaggagtcaaagctccgagttatgcttttaaaagcatctgcaagtctctttttgccggtggtgtcgctggtggagtgtcacgaactgctgttgcacctctggaaaggatgaagatattacttcaggtccaaaatccgcataatataaagtacagtgggacagtccaaggattgaagcatatttggagaaccgagggacttcgtggactgttcaaaggaaatggcaccaactgtgctcgtattgttcctaattcggctgttaaatttttcagctatgagcaagcttcaaatggcatactgtacatgtatcgtcagcggaccggaaatgaaaatgcccaacttactcctcttacggcttggagctggtgcaaccgctgggataatagccatgtctgcaacgtacccgatggatatggttcgtggaaggctaactgtccagaccgcaaattctccttatcaatatagaggaattgcccatgctttggcaactgtcctgcgagaggaaggtccacgggccttgtaccgtggttggcttccatcagtgattggagttgttccatatgtgggcttgaacttttcggtgtatgagtctctaaaggactggctagttaaagagaacccatacggtctagtagaaaacaatgagc

SEQ ID NO: 402 - DNA, 926 bp, Arabidopsis thaliana
  misc_feature (1)...(926): n = A,T,C or G
tttttttgagtaaagttggtgtcatttctgaagagtcaaaagactcggaaactctcacagccttaagcattacagtgcatttttgtttttcaagtttgctgggttgactaagtaaattaaattatggaaggaagaccaaacaaaagatcgatggagagtggtcactttagaggaatgtctgatagaagcgaannacgtaactcacacttgtttcactaagttgatcagtctcgttcactaatggctgtcaaatgctcctcaatctcctccgttgtcaatgcacggaattccgggttctctgctctcaccacacctacctcaatctcagtagccttgaagtcttcttgaagaacagattgcaaagccgatatggcagtctgcacggtttcatcaaatgtgaaagatgggttttctttcattttcttctccaagaaattgactgcttcttgttccttcataccagcactagttgccttgtgaccgtaaaaatgtccagctgggtcacatttgtaaagtaagggaccattctcttcatcaacacccattaccatagcgacaactccaaggggtctcatgtaagcatgttgagtgtagacctgtgacttgtccgctatccatttagcaagaatgtcaacaggcatctcatatccataagtgaaccgaaattcagctgcttgattccttgcttgttgaaccaaagaccttgcatcagctgtaatgccagtagctaccaatccaatgtacttggtgatagggaacngatgtgtaacactagactgatccaaaagcttgtcaggaactttnnnnngggtaacgacgcaaaccgaatctttcccacgaactccgattgaagtaataccagctgttttcacggccttgaaggcatattcaacttgaaagagacgaccttccggtgagaagatagt

SEQ ID NO: 403 - DNA, 926 bp, Arabidopsis thaliana
  misc_feature (1)...(926): n = A,T,C or G
aaggaatccacgagatggttgaaccttcatcgaacaggtaaaccgggctgaagtacttaacaccttccttcattatcaatctcactctcaacactttcccttcgttgtcatctgggatcagagtcgtaggaagcacttctatgaccgcatccgcgtactgcttttgcgggtcgatgaatgcatcgaagtcgggctttcgggcttcgatactcgctttgatgctctccaaactgtgacctctttcagccatgtccctctgaattttccaagcgaatttgacttcgttgctaatgtccaagtagatactgaagtctagtaagtctcttactcgctcatcaaacattgggtgaagaccttcgatgacaagaatcttaggaggctgaataagctccggagggtcaagaagtccagtgacatggttataaatcggtttctcgacggctataccattcttaagagctttgacttgctcatacatgagatcaaagtcattggcgcgtgggtccaaagcggtgactttctgctctttcctaccgtacctatccaaagaatggtaatcatcaagacagatcacagtggtcgtgtcgctgatgagtgtgttggaatcagggttcccgccttttggtggcttagcagcgccaccaaagacgctggtgagcctccgcataaaggtacttttgcnnnnnccagagtcagcagctagtccgatcacgatggtttcttgtgcgcaagtgatgagtgtgttgaatctacggttggtttgtggttgacgacggtagaggaagacttgtttggaggaggaagaagaggttaagaaatgagttgaattgagagcttgtgttgagtagatagttgagacagccattgttgtttgtttggtgttttggtctcctcttcttctccgcctaagctcttttttttttgtt

SEQ ID NO: 404 - DNA, 925 bp, Arabidopsis thaliana
ttttttttttttgattaacttttcacacaagctaataagcaacagagccgattgcccaatagagggttacacagttcattagacaatatgatcctatactttaatgaatcgaatatcaaataacagagaaggagacagagagagatattctccaacacaattccacaacagaattatctgctacgaatttgtctaccataaaagctcaatctgcaaactaaacaccagctttgtttccaagtctctcccgaagaatcttgactcccatgtatctgcaaagattgacaaatcctctgtttatatattgaactaaaaagaaaacctccaattcattatgttggtaatgattttgatttaccttcccatcatcatcatagtagcttgcgggttggttcctggagactcgtcaaacgttgaaccatcaataactctgagcctgtcgacaccaagaactttgcggttagggctcacaactttacccacaagacatccaccatggtagtgccagattgtgacaacagtgtctttgcagaactgagccattgatttggtatcgttcagttgctttggccttagattgatgtttgccttgacgcttaagctaagcatcttgtgtacgttttgcttgtcacactgcgtgtagtttaagaaacggttagacgtcaccactttggaaacaagacgaatggcttcaacacagcgttggagatccaccgggtgtttaaagtaattgaaggtgactgaagggttgtcatcaacatttgtgttgaccaagctcaaatgccctctagagatcgggtaagcaagttttccaagatgaaacttccattgaatgcttcgtgaagttggtatttgtttcttgtgatgtaagcttgcgttgcttctggtcttctctgctttgcaggaatggtggaaaacaattcat

SEQ ID NO: 405 - DNA, 925 bp, Arabidopsis thaliana
  misc_feature (1)...(925): n = A,T,C or G
ctttttttttttttttgaatgaatttgtttcgaaataaaattgaattatatttacagcagaggtacttggattaaagggaactaacaaagaacaatattcctgcaacataaaaactaatgacccttttctgtttccttcttcttcattgtagaagcataacaatactagtaattcatcactacaaaacgttccaacgtgaaaacccaaatttttttcattctttttctgcagaaaatgtggctgcaagttgaaatcaatcagcacgagagccgccgccgctgttcgcagaagatttccggccgctatatttctgttttccgatgctgaaaggaatgtacttgtgcttgatcatgtgggctatttggcgtctcatggtgaggacaaagagaacgacccagtagcaaagcagtatgggnnagaagacgggaacatcaaacaccgagaagaatgtcataagaaaggctatgcagaatgccttagtcatggagtaccagaatttaaactccgggagacggcggataaatggcttgaactcatcagaacctcgagtaggcagagtagctccatcagatacctcgagctcaggatcaacaagaggagacaaaaacccgataagcagattcaggaggtagattccaagaccataggagatgatgtagaatccgtgaatagagtaaaccctcaaacagtagataagaaagacaacaagtgttccgatccacctgttagttgaatgaggtgtagtcttgtccagataatattggtaaaccctccatgcctcatgtactttcttttgtacaggcgtagccatcgaaccactgtcaccaccgcttccttccattgttattcttgaaacggatggtgaagaagaagaaggaattagcttcctcaaagagagacctctcgacgacgcagcgaaaaaga

SEQ ID NO: 406 - DNA, 925 bp, Arabidopsis thaliana
  misc_feature (1)...(925): n = A,T,C or G
cacacttacatcctcctccgtcgccggaaacctaccaaattcctctgaatttactttcctcgccgcatattacccgccgagaccttttcaaaactctctccgtatgtattgccacaccatcactctccgtctccatcgccgcaccagctaacgcacgcggtctctttcaaatgccgcctctccggctctctaatcgttattaccttgtgagagctggggaatcagattacgaaagcttagggataatcaacacaaacccggttgccaaaacatcggtagatagcggattatcagagaaaggtaagaagcagactctgagagctgcgttacagttaaaagcaatgggagcttgtgaccgaaactgttggctctggccttccataacacagagagcttatcaggctgctgaaatcatcgccgccatcaatggaattagtcgcagctatatagttccggagtatagcttccttgatgctcgtggtttaggagcttacgaaggcaagaagcttgaatctatatcagaagtgtatgcattagactcaatatcgatgaagacaaaanntcctcctataagcgacggtacccccaacgagagtgtatcagatgtatttgtgcgtgtgacgcaactcatgtctattctcgagactcaatactcagaagacacaatcgtgattgtttcgcctgattcagacaacttatcggtgttacaagctggtatccnnnnactcgaccttcgaaggcactcggagttgtattttggaccaggagaagtaagattgttggatgcaaacagcattccagtgtataagcaacctgcttctgccgtatataagtgtaagaaaccaccaaactgtgactaaaaacattttatcctcagtatctatgtattgttattattcaaatacaattttgaagcttagtttta

SEQ ID NO: 407 - DNA, 924 bp, Arabidopsis thaliana
gaatcgtcgttttacggtggtcatgggattgttggtgctcaggttccattaggttgtggtattgcttttgctcagaagtataacaaggaagaggctgtcacatttgctttgtatggtgatggtgctgcgaatcagggacagttgtttgaagctttgaatatttctgctctttgggatttgcctgcaattttggtctgcgagaacaatcactatggaatgggaactgctgaatggagagccgctaagagtccatcttactacaagcgtggtgattatgttcctggactcaaggtagatggtatggatgcatttgctgtcaaacaagcttgcaaatttgctaagcagcatgcgttggagaaggggccaataattcttgagatggacacatacaggtaccacggtcactccatgtctgatcctgggagcacataccgtacccgagatgagatatctggtgtgaggcaggaacgggatccaattgagagaataaagaagctggtactatctcatgacctagcaaccgagaaagagcttaaggatatggagaaggaaattagaaaagaagtagatgacgccattgccaaagctaaggattgcccaatgccagagccttctgagctctttaccaatgtgtatgtgaagggatttggcaccgagtcatttggacctgacagaaaagaagtcaaagcttcccttccatgatcatggagctcttgttcgttaaactgccacgtgtcatgagaaagttggctgatagagaaatctatgaatatgaataaagatctgattgtatactctctctctccccccccttctgaactttaatctctctgtatctttgtttacaaacataaggagaaacaatgttattcttgtgaagctttagtagtctcgtgtttaatattcaagcaatcgagttgagat

SEQ ID NO: 408 - DNA, 924 bp, Arabidopsis thaliana
  misc_feature (1)...(924): n = A,T,C or G
agactcacctgagtatttgttttaatcagatcttcaatgatggtaatctctaaaatctgagtcttaaactcttttgtttgcttgttaatcaggtggagcttgctagattcagtgaaagattacactcatctactcatttccattcctcctttagctgacattggtgatccgatgttgcggaatgtagaacttgtgagagacaagctttcgagtggaaatcttcgatggctttgttatctctcatcaacaagtgtgtatggagattgtggtggtgcgtgggtcaatgaaaatcatctcccaaatcctaaaactcagtcagccaaagtgagattagctgcagaacaaggatggttaagcttgggtcgtgatcttggggtttcgactcaaatacttcgacttnnnggtatttatggacctggtcgaagtgcaattgataccttgttaaagcaggagcgtttgtctgaaggtcaaaagagaagagcgtcccgtaaattcacgtcgagagttcatgttgaagatatatgccaagttcttaaagctgccactgaaaagccagcatcaggggagatctacaatattgttgatgatgatccggcagcaagagaagaggtgtttgaatatgccttggagttgatcgagaaacgttggccggggaatatcaccacaaaaccatttccatttctgtatgaatctcgggaggaaagttcattgagaggcgagaaacgagtctgcaacgaacgcatgaaggataaactaggagtgaaattgctatatccttcgtataagtcaggactgcaaagcatagtcgagaacatggacaaccgtttttgagcacaccacaggactaaattccgctgatctgaatctttcctgtggagaattagggactctttagtaaagacagatttttagttaaaaaaaaaa

SEQ ID NO: 409 - DNA, 923 bp, Arabidopsis thaliana
  misc_feature (1)...(923): n = A,T,C or G
ccacgcgtccgcttcttcttcaccatttatttctcatcatcatacttataaaaagtaaatcagaatcccgaagcaaactttcaatcttccatcatcatcatcatgtccgatacacatacatacatacatatctttcgtgtgatttatacttattaaagagagattctctcattaagaagaagcttccttctttcttttctttttcttctctctgttcatggcggttcaagctcatcaccatccttctactctcttcttcctcaacaacggacaagaagggaatgatcagccgcataaatctcagtttcattcaatcaacgccggggttgatacaagaaagcgagcgagagaagtttcttcggtgattgatttagatatcacggcggctccgatgaaccctccgccgcaaactccaccgcaagttataggacgtcgacaaaatccgaatgttgtatcaaccggtctacgtttgtctcgtgaacagtcgcagaatcaagaacaacggtttttgtcttttccgataaccggagatgtcgccggagaaatcaaaagccaaacggacgaattaaatagatttcttcaaatccagggagagcagcttaagcgcatgttagctgaaaacagtgagaggaactatcgtgagcttctgagaacaacggaagaatcagtaaggcggagattaagagagaaagaagcggagatcgagaaagccacacgtcgtcatgtcgagctagaagcacgtgcgactcagatcgaaacngnnncacgtgcttggcaaatgagagcagctgctagagnngccgaagcgacgtcgttacaagctcaattacaccaagccgtagtagtagctcacggtggcggagttattacgacggtggagccacaatcgggaagcgtagacggtgtggatgaagctgaagacg

SEQ ID NO: 410 - DNA, 923 bp, Arabidopsis thaliana
  misc_feature (1)...(923): n = A,T,C or G
aaaccgatacatacacccacacccacatatatatctctctctccgtatttacacatacgtatatagacatatacatcatacatatacgtataatagctgaaagagtgtttttttttagagcgagcgacgaattccaatggaaggaagaaagaagaaagcttcgtcttcctctccttgttcttcttcctcgttaacctctgagctttttggttccagagaaaacccttcttctccttcctcttctggtattctcggatccatttttcctcctccttctaaggttttgggaagagaatctgtgcgacaagagactgtgactggtggttgctggaacgagaaaacctccaagactnntggtaatgttgatagaaacagggaacaacaggagaatcatggttcannttatcagcaggatcagagagtacaaccctgtcatctgagttcttccatctattacggnngtcctgatgtttatttccagcctcaaaattccaccagcaactctacgaacaagaaagatggaggcgaagatgattccggaagtgcctcaagaggaaattggtggcaagggtctctgtattactaagtagagatcttactacttaagcaaatgttataactacaaaatcaaggtacataggaacaaaaaaagaatagagtagctgtggatccgtcgtttttagtaacttctcatcttattattacaaaaagtatggaagaagtttgaatgtagcttagctgcagaaagcaggggagttgtttttgtcccttgtcgtggtttagtgattgacccgaccggttcagatttaattttcccttaattttatagttaaaccgttgatggttttgtacaaactctttaaaattccagtttccacgcatataaataaataaataacccttcctgtaaaaaaaaaaaaaaa

SEQ ID NO: 411 - DNA, 922 bp, Arabidopsis thaliana
cttttttttttttttttttcctcgaaactccagttctattattgaaaccatattcgtgcatttacataaataacacataacagaagtaaagactgaaactttagagtctaatacatcattaccttataaatacttccaaatgctataactatagacaatataaacgccaaagataaacggaatacgatccataacctttgcatcatcactcaaagcagagtaagtagtggctattgactatcctctgctgttgttgagaatcgaacctagagttcccaaaacggcgaaagcaagcaaagggctaacgtcaagcgtatcaaagactggagggataatgttcctgaagagattaagataaggatcacacagatctctaatggctgacaaaggctgacgatcccatggaatgtttgggaaccaactgagcaaaactctgaccatcagaacaccactgtatatatcgagccatttcgatagcccggctgcaactaccgtcaacggagtgttcagataaccggcgggtcgatcacggagcgacgcgaagaacaacggacttgctgttcggaaagatgcttgaatctgtggagataggttcacaattgcgacagagagcttctgaattagagatttgattacgacgccggctagaagcacgagggtggtgatcgatctagttgagtcggagaaggggaattgagaagggggtttagaggagagtaccggagacgaggaggtaacggcggaggaaacgatggttctagcgttatggagggagagattgaaagagagtttacggggaagagagagacggggacggatgatcggaggaggtagtctagggtttgcgagaattgaagcgcgaagagcgagactgttggttgtgaaagaagccatctttgttcctcggtgcccggacgcgtgg

SEQ ID NO: 412 - DNA, 922 bp, Arabidopsis thaliana
  misc_feature (1)...(922): n = A,T,C or G
tttttttttttaaagatgaagagtatatatatatatcaattataaatacaattaaattgaaagacaaatcgtgatctacaagaaaaaaaagctacatacaaataagtatacgagtgaagcgaaccctttttgatgacttttcaggcaagcaatcacaacatataaaagagccctagctttccccagattgatagctatatatacaagtacatatgcacaaacgctgagacattcctacacttctcttcagaaagcaatgaaattcttgttgagctgatcatgaaacctaccggaccgccgtacactagcggctcttctcgcagtgaaaccaaccgtcgtgggccgaatcgatctctgcctaaccatttccacaaactcgggatcattagaatgaccctcgtaccgaatccactgaatcatttgatggtatcccgggaagaatctcatctgaactgacttgaagacgaagaaagggatcaaagcgaagaacatcacgaagagagtggtgagccagtaggatggagctggagctaaggcttcaatgaagactttgtaagcatctgtggagaagctaggagtgatggctccatagatcatgaggaagatgtaccagaatgctactgagccccatattacaatgtgttggagccaagtgaaatagcttatggctaaagccatttggaggttgacgacccagactacgcaagtgtacattgtcccgccgagaatttctctgccggcggttttgccattagggttatagagttggtgtttgagagattccttgcataggaagaaaatggctagtgcnntaaagactccgttgaacatccatccgatgattctcttccagctgaagagaagattctgaactccttcttggtatagcaacgggaacttgtaacagtaacgagctgagacg

SEQ ID NO: 413 - DNA, 922 bp, Arabidopsis thaliana
ttttttttttataataatggatcacaggtttcattccttgattataaaaatccaacggctaagatctgctctaaacactttccagcaagatcataacctatttcatttattacataacaatcccacatatattttcaattcttctacccctttcttcttttttttcctctcctcatttctatatatctttctattataacatacagctgtaacaatttaattcccacactttgatccccctaaaaaaaggaccaccacaaaaacatttatgattttttttttttggggagcaatttttaaataaagaaaaatacagaaatctgtccctgtaaatgattttttttttttttgtaagaaaaataaacaagcatgtgatgatgagagagatggtggtagagagaaaattattaagcggaatcttcggcgtgagaagtttccttttttaccctcggctgaatcccataataaccaacgtaccacttgacgaacttcctcagccccgccgcgagatccgtcgtcggtttgtacccgaaatctttatacgctaaactcacattagcatgcgtgtaaggcacgtcaccgtttcttggcattttgataagatgcttcttagcttttgtccctaacaatccttccaagatcgagaccaatctcccaaccggaaccggggacgtgtttcctagattgtaaacacgtagctgagcttgtcctcgcttctttccgccgcttccggtgcttttctcagccgtgtctaacgcaccgacacaacctttaacgatgtcatcgatgtaggtgaagtcacgcgccacttcttgattgtcctgagttctgtaaatgtcgattgatttaccgtggaggatgtctttagtgaagaagaagtaagccatgtctggtcttccccatggaccgtaaaccgtaaaga

SEQ ID NO: 414 - DNA, 921 bp, Arabidopsis thaliana
  misc_feature (1)...(921): n = A,T,C or G
ttgttctccccgccaatctcttcttcatctcttcaaaatcccaatttcatcccgaaattctcattctctctcctctccagtaaccgcttctctctcctctccgtcactcgagcttcctccgacagtggatcaacctctcccaccgccgccgtctccgtagaggctcctgagcccgtggaagtgatagttaaagagcctccccaatcaacaccagctgttaaaaaggaagaaaccgccaccgctaaaaatgttgccgtcgaaggtgaagagatgaaaacaacggagagtgttatcaaattccaagatgcgaggtggattaatggaacttgggatctgaaacaattcgagaaagatggaaaaaccgattgggattctgtaatcgttgctgaggcaaagagaagaaaatggctagaagagaatccagaaacaacgagtaacgacgagccagtgcttttcgatacatcgattattcnatggtgggcttggattaagagataccacttacctgaagctgaactcttaaatggtcgtgcnncgatgataggannntttatggctnactttntcgatagtcttactggagtaggacttgttgatcaaatggggaatttcttctgcaagacactattgtttgtggctgtggccggagttttgtttattcgtaagaatgaggatgtggataaactcaagaatttgtttgatgagactacattgtatgataagcaatggcaagcagcttggaaaaatgatgatgatgagtcattgggttctaagaagaagtgataacaaagattcttgctttctttttttgttgttgttgtaattaggagatgaacttaccaaatgtaatatcaagagatttgaacaatgtttcctcagattatcgttaatcatgtctagtctctacttaaaaaaaaaaaa

SEQ ID NO: 415 - DNA, 921 bp, Arabidopsis thaliana
ccacgcgtccgctttcttctcaatttagaacttagtagctagtcttcaagataatggcacttgaaactcttacttctccaagattatcttctccgatgccgactctgtttcaagattcagcactagggtttcatggaagcaaaggcaaacgatctaagcgatcaagatctgaattcgaccgtcagagtctcacggaggatgaatatatcgctttatgtctcatgcttcttgctcgcgacggagatagaaaccgtgaccttgacctgccttcttcttcgtcttcacctcctctgcttcctcctcttcctactccgatctacaagtgtagcgtctgtgacaaggcgttttcgtcttaccaggctcttggtggacacaaggcaagtcaccggaaaagcttttcgcttactcaatctgccggaggagatgagctgtcgacatcgtcggcgataaccacgtctggtatatccggtggcgggggaggaagtgtgaagtcgcacgtttgctctatctgtcataaatcgttcgccaccggtcaagctctcggcggccacaaacggtgccactacgaaggaaagaacggaggcggtgtgagtagtagcgtgtcgaattctgaagatgtggggtctacaagccacgtcagcagtggccaccgtgggtttgacctcaacataccgccgataccggaattctcgatggtcaacggagacgaagaggtgatgagtcctatgccggcgaagaaactccggtttgacttcccggagaaaccctaaacataaacctaggaaaaactttacagaattcattttataggaaattgttttactgtatatacaaatatcgattttgattgatgttcttcttcactgaaaaattatgattctttgttgtataattgatgtttctgaaaaagatataactttt

SEQ ID NO: 416 - DNA, 921 bp, Arabidopsis thaliana
  misc_feature (1)...(921): n = A,T,C or G
tttttttttttttttttttttttttttttaaaagaagaaatataaattatctcagaaacaaattaaacagtctaaaaaaaaccttcaacaactttgaacagactctgtgattataaaaacgaaaactctcattattctcttcacctccataacccctaagttctggtcaagatgttcaaaattttgtatcttggagagtaaaaggctttaacttttaagtaattctctacaccgatgatattaagagttacctctctatatcatcctcaggtttttgattgtttcttttctcttacttcttcaaagctgtggagataacctcagtgtatttgttgatgtattcatgcagctccaatgagtccaccaggttcttcagctcgtttgtaacctccgggttggaagatagaacagctgcagcagcggctcctgcagcagctagaaacactaaagtaanngctgttcnnnngaggcagccacttccacgggagagtctccccgagatcgttttgcaagacttgtcagcttctttgtaaagagaagcattggctcctccctcagtgatgacctcctcgttctttagcctgaagcttttcatagttcggttgagagtgagagcatcattcggtgatgatgatagtttgaccgaatgctctttccattcttcaacaagctttttaagaacagcaacactagcttccagattctccttgtagagattgtcccagtgcttgcagcaatcaaagttttgggtcacagaccagatagcaattgctgtagcttccttggctaaaacaggatttccttctccagctaatttcagagcaaaagtgaatatctgttgtgtgacttgtttcatcgccttgcttcctggtgcaccagcaagagccacttctttcagcaagggatatattgcctcaaacc

SEQ ID NO: 417 - DNA, 921 bp, Arabidopsis thaliana
ccacgcgtccgcatttttccatcttcctcatcaccttcccaagaagaagaacaccaaagaagaagaaaggttaataatgatgggcagtgtcgagctgaatctgagggagactgagctgtgtcttggtcttcccggtggagatacagtggctccggtaaccggaaacaagagagggttctcagagacggttgatctgaagctaaatctgaataatgagcctgcaaacaaggaaggatctacgactcatgacgtcgtgacttttgattccaaggagaagagtgcttgtcctaaagatccagccaaacctccggccaaggcacaagttgtgggatggccaccggtgagatcataccggaagaacgtgatggtttcctgccaaaaatcaagcggtggcccggaggcggcggcgttcgtgaaggtatcaatggacggagcaccgtacttgaggaaaatcgatttgaggatgtataaaagctacgatgagctttctaatgctttgtccaacatgttcagctcttttaccatgggcaaacatggaggagaagaaggaatgatagacttcatgaatgagaggaaattgatggatttggtgaatagctgggactatgttccctcttatgaagacaaagacggtgattggatgctcgtcggcgacgttccttggccaatgttcgtcgatacatgcaagcgtttacgtctcatgaaaggatcggatgccattggtctcgctccgagggcgatggagaagtgcaagagcagagcttgaagtcaaattaaaaggataagtggtatcgattatatatttgattaacacattgattggtgttaattgctcttttttttcttacgatgaaatacattgttcagtttcttttgattgtctgtgttttgatcaaaaaaaaaaaaaaaaaaaaagggcgg

SEQ ID NO: 418 - DNA, 921 bp, Arabidopsis thaliana
tagggtatttgattctctcacacactagcacaacgatgggaatttcacattattcctttattcccaagtatatgggattatatctattgttcatgagctgatacaaataatcttttttagtttactttctaatttattaacttgtaatggatttcttgaggcagtctacaataccttcgcaatgagcctcctcaggaacaacacaccctgattcttcttcagtatcatcatcttctaaaatggagtgtggagaacgcagactgcctagagtctgacaagctctcattgtcttgcagtgttctgcttcatcatctcttatgttcacaaacacatcgtatagattttctattactggtcttcgagtattgggagttcttgatgtttggaactcatcaaataagtacaagtcacctcccgtatagtattttactgcgatatccggtgcaggcatattcttcaactcctctccactggccttgagaaatttatcataagtctcatatgcatgactctccacacattccgaaaagtgatatgccattctagggcttaagatatacaagaacactgtcatgaagtagtagaaggttgctatgtgctgagccagaaaacgatcaaaccaccaagaatttccacccaattcttccattatgagcaagtgatgcatttcattccagctctcagcaaagtgtactttcaaataatctgctctcctccaccaaccaaaggtctcatacatatgtagcacagacataaacgcaaaataaggcactctagcaattgtctcaagaacaaagaaccttgcatatgttcggtcacgatacaaagtgtcaagtatcttaataaccgagtctgtaaggaaaacattcactccttgctcaagcttgatgatccatgtctcaaaagcactagttgaagaag

SEQ ID NO: 419 - DNA, 920 bp, Arabidopsis thaliana
  misc_feature (1)...(920): n = A,T,C or G
aagaccttacattgatctttaggttacatacgaggaggaggtttctgtgtacattacatgtgatttactactacaaatattacaaggccagactctgcttcgtcatttccattttggtgagaagccctctcatctcttcctccattctcatcttcatttcataaaactctctctgccctctctgcattgcctctaactcctcgtacctcctcctccttctctcctgtgcatcctccatactcaacttccccattctccgattgtactcttcttctatcttctccttcttcgctattgctattcgtttcagtccctctgcttctcttcgtgcatcatcggcccgcccttggaacatttctgcctctgcttgcttcattctcacaatgctctctagctcttcgaaacgaggttcctttggtgaaccccttttcaactccatctccactgcacatatttcaacttgcctctctctgtggaatgcatcagctacgctcgctgaccttttcagctgattatgcgggttatctgagcacaccgatctcagccacgccgtgtcctgactagggcttcccctctcatgnnngggttttggctgttcgtatatgaacggtgcactagtttcagcaggagtggaggaatcacagtctgaaatgaaacccaatatgcgattgcaagcttcaggaaggcctatcaatttacttttcaaacttgccagcatcgcatcagcagcttgtctcagctgtttccctctagagtctttgcttgatgaaaatattttattgacatactccagttccttgcaaaagcgctcaaatttccattcccttgcaaaattcagaaacacttctttgacaaagccaaacatctctgagggatggttacaggcaacacagtgaaattgcatctcggcggacgcgtgg

SEQ ID NO: 420 - DNA, 920 bp, Arabidopsis thaliana
tttttttttttaaaagattcatcaatatcattgaagattttacacaccagaagtagcaaagccgtaacacacaaagcttttcgctacaaatgcatcatacataaatggagttttgagagtacaaggggcgatacagatgtaacgtggaatgtagaaagtgttttatatagcagaataactgaagtcaacactatcatcattggagacggaaggagaaggagaaggagactcagcagaagcagtgagtaccacaaaggcaccaaagagaatagtgataatggccgtgaagttgataagaaatgcttcggatccatacttgtcaagccctccattctccaagaaagtcagcttttccagaaaccctaaagctgcattcccgacagcaagtatgtaaacaaacaggccaagcattgcgtgccacggaagcaatccgcttttcaaatttgttgatcctcctgggaagaagaacactatgaagctgtacacccactggaagccataaagagaaatgactccaataccaatccaggaatggagactgtagagattagggatatggctttcattgtggttcttaaaggctgcacagatgccaaatatcccaagagccagagcaatggcatggagtataaggtggatcaacttcttcactggtttctccagcggaagcgatttgtaacttatgatggcttctcctcccaagattataaatccgatgagcatcagaacaggatgcagattgaagatgagattcttgttagtagcttcccaggccaatccacctctgtaactgatactccaaaccagtaccataatcgccgctattaccgccagcgcgtgcgccacaaacgtcaccgccatcgcgtttatccggacagccatatctctttctctcctgcaactgtgtttctttcttcttg

SEQ ID NO: 421 - DNA, 920 bp, Arabidopsis thaliana
ttagaattcaagctcacacgagcattcgatcaccaagacaaattacaggaattcacaaatctgtctttcattacacagtgtttttgatacacataaagctcataaggtacacatatttctatttttacattcattagttgaaagggataacaatatcgccaatgttgttgtgccatggatccgccaagtgagttgccaagttctccaatggtcctgtccccgggtaagccgactgttgcacacagaatcctacaaacgccaacagcgcaagccgcccgttcttgatctctttaactttcaattcctcgagcttcttggggtccttcgagtatccaagagggtcaaatgcgcctcccgggtacttcttcttctcagggtctttctccatacttctctggtgctcaacaaatgcaatggctaagaactcaatggccaagattgtgggcaaagtaccccacgggactgggtttcccaagtaagtggcttgaccccctggtagtgctgcccattcctgagccttaacccagtttccatatcctaatgcttctggtaccaaaatcccaggaacagcgagcatagcccatctacagtggatgagctctgactctttgtatctctcaaggttcgctggaacttctccaagtccaagtgggtcaaacccaaagtcaccaggagcagaaccgtcaaggtaagctggtcgtggctcgccaggcatccagtgagcagccattctgatacgaccaacattcccggcgtttgggagtggaactccggcggatacgaatttagacttggaagaagagagaagcgaagggtacacggcggctatgccacagctcataagcgagttcgacgccatcgtttctctctatctgtcgttgtgtttgccaccaaaggagaaagatgtggacgagacctgc

SEQ ID NO: 422 - DNA, 919 bp, Arabidopsis thaliana
tggggaaaagaaaagctaatatttcaaattttatgattgtactggaaatttttcatcatcatcagaaagctttaagttcaacaatgttttctgatgagcattacgaaattaaatgcaccaattgaaattttatctaacatgcatgtagtatagaaggcggcttcagtgatgtctaagcaaaccgggaggaacggaaaaggactggtttcttcattagcgttgcaggccagctttgatgtaagctgcgtaaagatccatggagtccttgatagcgtctatggcagcttgagcgggaaggaaagcttcaacgtcgactttcttgttctcgttcttcttgtagtcctcaaagaagcgacggatttcagctagacggtgagggggaagctctttgatgtctctgtagtgacggaactcgggatcatcagcacatactgcaatgatcttgtcgtctttctcaccctgatcaatcatgggcattagaccaatagcacgggcacggaggaatgatccggttagcacaggctcctgcatcagtaccaggacatccattggatcactgtcttcacagatagttcgagggatgaaaccgtagttgtgggggtacacaatggatgagtagagaacgcgatcaaccttaataaggccactgttcttgtctagctcgtacttaacctttccacctttgctaatttcaacaacacagttgaaaacagtaggagcttctggaccaatctccaagtcatgccaaggatgagcagcagctgatctgtgagtgaaggctgcaaagtttctctcattcagcgtaacattagggttcctgagagggaaagcatagcccttggcgcttccttcatccttgatttcagccatatcggatgttcaagatgaaatctcaagcttcaatcgcgaaaccgaagca

SEQ ID NO: 423 - DNA, 919 bp, Arabidopsis thaliana
cggggatgttttggaaaactctagctcaagatcaaggccattgccatggcggagatcatttggacgaccaggttcagttcctgattctgttatcttccagcgaaagcttcagtggcgagctagcatatacactaagcaattacgagctgttcgattacattcaaggcgcttggaactaagtttggcggtgaatgattacaccaaagcaaagataactgaaagaattgagccatggattagaagagagcttcaggcagtccttggagatcctgatccctcagttattgttcattttgcgtcagctcttttcatcaaaaggcttgagagagagaataatcgacaaaccgggcagaccgggatgttggtggaagatgaagtctcctctcttcgaaaattcttgtctgataaggtggatatattttggcatgaactaagatgttttgcggagagtatactcacgatggagacttatgatgcagtggttgaatacaatgaggtggagtaatagcagtaaaaaaaacagataaccgagcactatgctctcgtcaaatgaagtaaatagacagacttacaacgcgactgttggtgtcttggaagttcaatagtggaaagactggaccaagtaagagaaaccaagagttaaagagtaggtaggaggaagatgttgagatgatgcaagtttaggtgtggagttagttttgagatagctataggtggattctcaaatagctgacacttagtctctctacttccataatgtacgtctcttctataccaaaaattctcacccccaaagtttctttccaacgcttttcctcacctcatcattttttcttacgtttcgagtaccacctatttcaacaacattaaatattttctataatttgactatcaatttttaataaaaaaaaaaaaaaaa

SEQ ID NO: 424 - DNA, 919 bp, Arabidopsis thaliana
tcgagcggccgcccgggcaggtaaaaggggtcatttactatcttttaagagacgacatatatagttctcgaccaagaaaagaaaagggggtgacctgagttcttcaacacataacataatggccggagttttcaaaacggttacgtttcttgttttggttttcgctgccgttgttgtcttcgcggaggactacgatgttggtgatgatacggaatggacgagacctatggaccccgagttctatactacttgggctaccggtaaaactttccgtgtaggcgacgagctcgaatttgatttcgctgctgggaggcatgatgtggcagttgtatcagaagctgcatttgaaaactgtgagaaagagaaacccattagccacatgaccgttcctccggtcaaaattatgctaaacaccactggaccacaatactttatctgcaccgtcggtgaccattgtcgttttggtcaaaaactttccatcactgtagttgctgctggtgcaactggaggtgctactcctggtgccggtgctaccccagcacctggatcaaccccaagtactggaggaaccactcctcccactgcgggtgggaccacaacaccttcaggctctagcggaaccactactccagctggaaatgccgcttcctcattaggtggtgctacttttctggtcgcttttgtttctgctgttgttgctctcttttgagtcacactcgaaacctagttatgtatttgttttaccttactctccttatttaaatagtcatgtatttgattatttgtgagaataaggacttgttttcaagtcattataaacgtcttatacttgtgattagtattgagtttcaatatatgattattcggttgcaaaataaagagtgggtttcaatatcaaaaaaaaaaaaaaaaaaaaaag

SEQ ID NO: 425 - DNA, 918 bp, Arabidopsis thaliana
  misc_feature (1)...(918): n = A,T,C or G
ttttttttcaatataaactcatatcaccaccaaaccatcattacaaattctaaaaacaaaactctatgaaacacataaaacagaaaaatatatatttagtctcttatatatataacatcactgcatttagaaagtattaggctgtttagcctgagagatcatctggacaacctctctcatggtcggtctctcaacactatgttcttgcacacatagcattgccacaaagaacagttccatggcctctgctaatggaatattgctcaatctctggtcaatgatcttcaccacaccttgtctgttacagtttgtttggatctttgaccattgcacaatgtctatcccttcttccccaaaattatctactggttttcgacccgtaatcagctccaataacactactccgaagctgtacacatcgctcttctcgtctattctcagtgtatatgcatattctggagcgatgtagccgtacgagccagcgatcgaggacatgcactcggaagctccattgtcttgcatcataaacttagcaagcccaaaatcagcaacatgagcttcaaactcaggacccaacaagatgttgtttgacttcacatcacggtggattataagtggcgagcaatcatggtgaagataacacaaccccttagccgcttccaacgctatttgcaannnnnnntcccatttcaaaaacactccagctttcccgtgcaagacttctccgaggctaccattaggcatatactcgtaaacaaggagattcacgtctttgtttgaacaaaaagcgagcaatctcactatgtttctgtgtctgattctacctaatgtctgaatctctgcggctaaaccgttgtcatgagatgatcctttggttatggttaagagcttcttgactgcaacttctcggacgcgtgg

SEQ ID NO: 426 - DNA, 918 bp, Arabidopsis thaliana
  misc_feature (1)...(918): n = A,T,C or G
tttttttttttttttttttttttatctgaaatattttatccattcctgtctaaaaagatgagaaacaaaaagctggnnnataaggtcccttcagtgccaataatacattcatagttatgatgaacaatgagcatcatactaaaaagtgtaaaaactatggtttctgagttttgaaaatgctacaagaatatcataagatgagggaggttcatatcacttaagtaactgttgcagttatctcacaaaagtgttgtcgtcgtcgcgcggttttagcggattattttaaaatacaagagacgctgattcatcagtggaaaacaaatcctccgcccgagtgttcaacttcctgaggagggggtagagatgaaacccaatctgatgcatgtgttggaagaagccccaaagtgttaagcttccagacacccaaagctagccctccaaggtttagggcaaggaacactaatttcggcataagtagttccactttgttatccttgaatggctcaaaaatctttccaacactctgaagagcactgataggctgccaaagagcagagaaagtaataccaatactaaaaagatgaactgtgtttccagccatccacatcatgaaacccatcatcatcaaattcttaaatggagattgcgctacttcccacgctttctgaagtttccaagtagcttcagcgtctttcttttggcggctgtttgctgaatcatcctgtnnnnnagaggcacgagagaagccaggtggatcgaggatgtcacgggaagatggaacagtagattgatcggagaattcgacggcccatctccgaccagtacccatcactgctttgcctttgtccattgtcttctttcttcgatcgagagagacacagagagattggggaagaagagacctagatcggatttatc

SEQ ID NO: 427 - DNA, 917 bp, Arabidopsis thaliana
  misc_feature (1)...(917): n = A,T,C or G
caaaacacaactttcatatataacaaaaaaagttatagaaatggccaaagacgtggaaggacctgagggatttcagacaagagactacgaagatccgccaccaactccgtttttcgatgcggacgagcttaccaagtggtctttatacagagccgtcattgccgagttcgtagccactctcctcttcttgtacatcaccgttttaactgtcatcggttacaagattcagtccgacacaaaagccggtggagttgactgcggcggcgtcggaatccttggcatcgcgtgggcttttggtggcatgatcttcatccttgtctactgcaccgccggtatctcaggtggtcacataaaccctgcggtgacgtttggtttgttcttagcccggaaggtatcgctgattagggcggtgctttacatggtggctcagtgtttgggtgctatttgtggagttggtttcgtcaaagcctttcaaagctcttactatgatcgttacggtggaggagccaactctctagcagacggctacaacacaggcaccggactagccgcagagatcattggaacattcgttctcgtcnncacagtcttctccgctactgatcccaaacgtaacgctagagactcccacgttccggttttggnnncacttccgattgggtttgcgntgtttatggtacatttggccactattccgatcaccggaaccggcatcaacccggctaggagtttcggagctgccgtaatctataacaagagcaagccatgggatgaccactggatattctgggtgggaccattcattnnagctgcgatagctgcattttatcaccaatttgtcctaagggcttcaggttncaagtcacttggatccttcagaagtgcagccaacgtttgagtttttgccacacaaaaaa

SEQ ID NO: 428 - DNA, 917 bp, Arabidopsis thaliana
  misc_feature (1)...(917): n = A,T,C or G
ccacgcgtccgattggctcttcatttctgtgtatagcggtgttcctacaataacacgaagcaatgagagacggatcttgcgttcccggacaaagcaagtagaaggaagagatgcacctgtttctgtttctattgttccgggaacagaggagggttatactggaaaccctccgtctagaaccggaatcttggtgatactggatagaatatccaagtcctcttttgttggcgcatggagaatttatttcaatcaagaagttgtcctccccggggtttctctagctctcttgttcttcaccgtcctcagctttggaacattgatgacggctacattgcagtgggaaggtatacctacatatatcatcggtataggcaggggaataagtgcaacggttggactagcggctacattagtgtatccgctaatgcaatcgcgtctctcaactctgagaaccggcctctggtccttctggtctcagtggagctgccttttggtctgcgttggatcgatttgggttaaaaaggataaaatagcatcttacatgctaatggctggagttgctgcttcaaggcttggcttgtggatgtttgatcnnnccgtcatccaacaaatgcaggatcttgttncagaatccgaccgttgtgtggttggaggtgttcagaactcactgcaatcggctcttgacttgatggcatatcttttaggtatcattgtctccaatccaaaggatttttggatattgacgttgatctcattctccacagtatcgttggcaggaatgctctatacaattcacctctaccgcataagaaaccatatttttcatcttgagaagattcttttgttgaacaaatgtttattcaagttgctcccttctcgtggaaacgtgtaattcataatgttgtggaatgtgccac

SEQ ID NO: 429 - DNA, 917 bp, Arabidopsis thaliana
ttttttttttttttttttttaagtggaaagtggtttatatcataacttggaaacatcaatctcctaaatacgaaaacaaaagcccaggagatatattttcactccggtatctagcatatagccggcgagaaacaatgattgcaaggatttttcttggacggcaccaagagttttagtgaaggaaataaaattgattagtaacagaacaaaaaagaccgagacaacgactcactctgcttcttctaatcctctagctcgatgattttgaccacggacgcatctcccactttctgacagaccacaactctgtcatgtgacttgatcactccggcttgcttcccatggtctagagccactttaagaaccgactcatttgttgcacttgttgattccgcagggtgacgaggatcagcaagcatggggaaaagacctctgacaataagtgactgccttgcctcaaaggctccgctaaagctccacttcagctgatttgtcgtaagtcggggaatgacaacagagagaacgggcatagttggacggtatttggcaatcaaccttgctgctctgccagacgaggtgaagcatataattacggatgccttaaccttgattgctgcccgtacagcagaagaagcaatagattccaagtgagtcattggttctccaacatacttgacagtcttcttaaagaacaaatcttggttgaaaactttctctgcctcacaacagattctaccaacagttgatatggtttcaacagggtacaatccacgaagagtctcagcaccaagaagaattgcatcacttccatctaaaacagcattagcaacatcagttgcctctgcacgagttggccgcagattgtctgtcatactgtctacaacacgagtaagaacggcaggctttccagccatgtt

SEQ ID NO: 430 - DNA, 916 bp, Arabidopsis thaliana
  misc_feature (1)...(916): n = A,T,C or G
ctttttttttttttttttttagagacaaaaggattacattgacgttaccttacaaaaaggttgttacactaaaagaattcattttgaagaatacaaaaacaagcttcgtaggttcttgtctaaaatcagtcattgaaaatcagaagacgatgaagatgttagatcaggatcttcaaacttattaaaccttttccgagtcgctgcatcgttgctaatgctaatcccatgctgctttctaccatacgagtcttcgtttatgtaatcttcatcctcatcatcaacaacattcacatccattttcatgttcatgtcttcttcttcttcctcttcttcttcgtattcatcatcactatgtaagctaaattcccccctacctactaatttacttgattcgccgccgccatcaaaatcatcaatcggagccatgacatcatcatcatcatagtcctcatactgaaacgatctccccgagctgctagcttctccgtcatcgtcttgcagttcaggggtttcgatccaatcgtcatcgttatcannaagactggttttggcggttacagcaacttccttaacccgacgtcctcctcctacttcattacatataccgagtgttccttgcgttggtctctttcggcctttggtgccactacgccgcccattctttctacccccacgtggttgtgctctcggtctcaacatggtttcaccatttgagtttgctgcacctcgtggtggtttaacagaaactgccggtttcttgccattgccacgggcacgaggccggccacgtcctcgtggtggtcgacctcctctcccagagctagacacaccacctaaaccaggatccgtccagttctcttcttgcttataagcagcaacttgcaccggagtttccattacgtccttctcatgtaag

SEQ ID NO: 431 - DNA, 916 bp, Arabidopsis thaliana
  misc_feature (1)...(916): n = A,T,C or G
tttttaatgttaaattataacccaacaagctaatattcatttttaaaaaggcttcataagaacacaaagacctcataaaaaagcataaacggggttctttggtgccaccactcttctaaacaaaacaccaaacaaaaaacagagaaagtgaaagcaagaacataaacgatgatataaaaactacgatcctcagcctctttcttcagtacttgtaatccttaacgtgaaggctctcagctgcaccttcaccgagcttagcatcacccttgtaagcaccaagtgttgcttcagagttagctttgcatctgaccaagaacgcttcttgagccttcttcacattctcctcttttcctccccaagtcttcaaagtgctctgctgcaacgcccttccaaaggagaaagacaacgaccaaggcttctttgtcttcaactggttcatcgcgttaaggtttcttgtcgcctcttcctcgctctgtccaccagacaagaacactatggctggaacagcagctggaactgtcctctgaagagcacggacagtgtgctcagcaatcacctctggtgcaaccttcgcactctctgatcctggagtaaccatgttaggtttcaagagtgttccttctagcaagacatggtgatcactcagagccttgtagcaagctgcaagaacacgctctgtcaccgnggcacacttctgaatgtcatgagagccatcaacaagaatctcaggctccacaatcggcacaagaccgttctcctgacaaatgacagcatacctagccaatccataagcgttctcatggatagctaactgagatggctcattaacaccaatcttaagaaccgcacgccacttggcgaaacgagcaccagcctcgtagtatttcttgcaacggtcaccaagaccatcaagacc

SEQ ID NO: 432 - DNA, 916 bp, Arabidopsis thaliana
ttttttttttttttttttttttttttttttttttttttttttttttttttttttttcaaaatttacttttacttgtagcagagaagaatcagcggttgggaagagtagttacagattataatcaaaccgaatcttctatatacacataagctgtgaaagatcgagagatggtagaattaaaaagacgattttaacctcatcaaatcggtggaggagctgagccgtaggaggagagaagctgaactaaagagttcatggctctcacttgcatctccagagcctgaatataatcagttgcttcttctagaatcaccggtacggattgtttaccgcaaccgggaactaaccggcctagaacacgtactttccggttaacatccggtatactcttcttattcaatctcaacaccgacactctccgttttctcgatctgttgctgctgctactaaccaccgtagtcatggccggaatcgccatcgtagctcgaggacgtctctgtttacgaaatttcagtttgatccgattagctaagatcgctctgctccagagtgttcttccccgagcggaaacggcaagagctcgatcggcggcttcacggacggcctttcctcgtttctgagccgttggagatgatgatgttgaggcggaagagttgaggcggacttgttggagcgcttggaacagtttggctgagtagatccgttgttgcttctccgatcgccatcgcgcgtgaatctcaccggagacggaagatgcgcttgaacgagacgatgcggcggatgaagcagaggatctcttctttctccgaacgagatctgaagtagtactcgtcggcggttcaatatctgagatcagagacgccataaccaaataattggctctgatctccgcagtcgtattgaaagagctacagaa

SEQ ID NO: 433 - DNA, 916 bp, Arabidopsis thaliana
tcgttttgttgatttcttctgggtgaagatgtcaggtctcgaagatatcaagaacgagaccgttgatctggaaaaaattccgattgaggaagttttccagcagctaaaatgtacaagggaaggattgacaacgcaggaaggggaagacaggattgtgatatttggccccaacaagctcgaagagaagaaggaaagcaaaattctgaagtttctggggttcatgtggaatccgctttcatgggttatggaagctgcagctctcatggccattgctttggctaatggtgataatcgacctccggattggcaagattttgtgggtattatctgtctgcttgttatcaactccacaatcagtttcattgaagaaaacaacgccggaaatgctgcagctgctctcatggctggtcttgctcctaaaaccaaggttcttagggatggaaaatggagtgaacaagaggctgctatccttgtcccaggtgatattgttagcattaaacttggagacattatcccagccgatgcccgtcttcttgaaggagatcctttaaaggttgatcagtctgctctaactggagagtcccttcctgtgaccaagcaccctggtcaagaagttttctctggttcaacttgtaaacaaggagaaatcgaagcggttgttatagccactggagttcacaccttctttggtaaagctgctcaccttgtggacagcactaaccaagttgggcacttccagaaagttcttacatccattggaaacttctgtatctgttctattgctattggtatagcgattgaaatagtcgtcatgtaccctatccaacaccgaaagtacagagatggaattgacaatctcttggtcctcttgatcggtggtatccccattgctatgcccacggtcttgtctgtgact

SEQ ID NO: 434 - DNA, 915 bp, Arabidopsis thaliana
tttttttttaccataacaacaagatccctgatattattttcaaattgactcataaagcattacaaaaggagatggtttttctgaaacatgaaatggttggttacagaagacgatacatacaataggcagctatgttcatcatctctttccttttcctttagcatcaaagtgatgagactttagtttcttcttccgcactatcgcgcctgtgctgccaccacctccttccctgaaaggcattcccattagagccaatagtttctgtccttcttgatcgcttttagccgttgtgctgatgcatacatccattcctctcgtttttccaacggcatcaaacctgatttcagggaatacaccttggtctttcacaccaatactgtagtttccgttcccatcaaagctactgggactcacaccttggaaatctcgagttctcggaagggctaagttgataagacgatccaagaaggagtacattacatctcctctgagagtgacagcaatcccaagaggttgatcttccctgatcttgaaagtagcaatggaagctctagctcgtgtcttaataggtttctgccctgtgataagcgcgatatccttcatcgcagcctccaaacccttgtcgttctgcgccgcatctccaataccacaattcactacaatcttctgtacctttggaacctggtgaatattaacgtacttgaactcttctttgagcgcagggataatcctctcgaggtaagcggttttgaggcgttgagttttctcggcttcagatttctcgaccagtacagttccagacgccgagactttcaccacgtttctgagcggcggagagagcattcgtgcggaggatggagccgctaatggtgagaaacgtccgtgaaacgaagaagcggaagactgcagaagcga

SEQ ID NO: 435 - DNA, 915 bp, Arabidopsis thaliana
  misc_feature (1)...(915): n = A,T,C or G
gagcacaagaagagaagaactggggaaagccaggcagcaaaaagtcagcaagaaccgtgtggtttggacgcactggcgagtgcagcagtcttaggagacacaataggcgagccagaggtagcgaccacgaccagacatccaaggcacagggctggatgctcttgcatcgtgtgcattcagccaccaagtgggaaaggtaggcacaagcctacatgtggctgcactgtgtgtagcaccgtgaagagaaggttcaagacgcttatgatgaggaggaagaagaagcagttggagcgcgatgtaacagcagcagaagataagaagaagaaggacatggaactggctgagtctgataagagtaaggaggagaaggaagtgaacacagcgagaatagacctgaacagtgatccatacaataaagaagatgttgaagctgttgcggtggagaaagaagagagtcgaaaaagagcaataggacagtgttcgggcgtggtggctcaagacgccagtgatgttttaggagttacagagttagaaggagagggtaagaatgttcgtgaagagccgagagtttcaagctgatatggaaggaaaaagggaaagggtaaannncaaagtcatagccagttttattaatatgctgagaccaagagtaggagaagaagaagagaaagagagagagagagagagagagagaagtacagttttgtgtttgattctgtcatagttgtaggaaaaataagtttctggttctaaacagcgacaatgtcccatcttttgnnntttgtttttgtttttgtatttttatggtatcgtgttgagtttggggtttatagtatgtctccattaatctaggttttgttgtagaaggcaaatggagctttgtgcttggtgatgaaacagttgagttgatttttt

SEQ ID NO: 436 - DNA, 915 bp, Arabidopsis thaliana
  misc_feature (1)...(915): n = A,T,C or G
tttttttttttttttttttttttttttgagaggaacaagaaaggttatgttcatatcattacaagaatcacatcaagacttgaaaatttaagctccaggtgcaaacttagttgcgaaagcccacgcattgttagcaacagggttgtcaagatggtcaaggagattctccaaaggaccttttccagtaacaatggcttgaacaaagaagccaaacatagagaacatagccaatcttccgttcttgatctctttcaccttaagctcagcaaaagtaactggatcatcagcgagacccaacgggtcaaagtattgcccaccggggtacaagtcgttgccttcgccaacaccatcaagaccgttgatgcggaaaccttcaaccaaacccatgaggatgacttggaagccaaggacggctaaaatgctctgagcatggactaggtttgggttgcctaagtagtccaaaccgccttcggagaagatttgtgaaccggctttgaaccagactggttctttgaagtccacacggacccacttttgaagaacttcaggggttatgcaaccaaaagctcccaacattgcccatctcccatggatcacctcaagagctctgtttttggcaagggcttcagggnnngcggataaaccngcggtgtcccaaccataatcgccagggaattctccggtgaggtaagacggagtttgaacggaaaagggtcctaagtacttcactctgtcaggtccataccaaagatcatttcccatagtgtacttgggagatccgagagagacaacatcacgaagggggttaaagcttgaggctttagtctggccaaggaatgttgttggggtaagaacactgcttgagctcgtgaatgttgatgccattgtctctctcggcttgagcttttctttttt

SEQ ID NO: 437 - DNA, 914 bp, Arabidopsis thaliana
ccacgcgtccgcttcttcttcttcttcctctctgttttttctctctctttgtttggaaccaccatggataatgtcaaacttgttaagaatggtgttttgagattgccacctggattcagattccatcctactgatgaagaacttgtggttcaataccttaagaggaaagtttgttcttctcctttgccagcttcaatcatccctgagtttgatgtttgcagagctgatccttgggatttacctggcaatttggagaaagagaggtacttctttagcacaagggaagctaaatacccaaatgggaaccggtctaaccgggcaactgggtctggttattggaaagctaccggtattgataaacgggttgtgacctctagaggaaatcaaatcgttggtttgaagaaaactcttgtcttctacaaaggcaaaccacctcatggctcaagaaccgattggatcatgcacgaatatcgcctctcttcttctcctccgagttctatgggtcccactcagaactgggtactctgtcgtatcttcttgaagaaaagagccggtaacaagaacgacgacgacgacggagatagccgtaatcttagacataataataataacaattcgagtgaccaaattgagataattacaacagaccaaacagatgataaaacaaaaccaatcttctttgatttcatgagaaaagaaagaacaacagatttgaaccttttgccgagctctccttcttccgatcatgcttcaagtggagtcacgacggagatcttctcttcttccgatgaagagaccagtagttgcaatagtttcagatgaaatctttaatttaattttaatgttgactatcttaataagttattatagttttatattaatacgactctctttcctttttaaaaaaaaaaaaa

SEQ ID NO: 438 - DNA, 914 bp, Arabidopsis thaliana
  misc_feature (1)...(914): n = A,T,C or G
acaatggctctctcctcccctgccttcgccggaaaggctgtgaacctttcccccgcggcatctgaagtcctcggaagcggccgtgtgacaatgaggaagactgttgccaagccaaagggtccatcaggcagcccatggtacggatccgaccgagtcaagtacttgggtccattctctggcgagtcaccgagctaccttaccggagagttccccggagactacggatgggacaccgctggactttcagctgatcccgagacattcgcaaggaaccgtgagctagaagttatccacagcaggtgggctatgctcggagccctaggctgcgtcttccctgagcttttggctaggaacggagtcaagttcggagaggcggtttggttcaaggccggttcacagatctttagcgatggaggactcgattacttgggaaaccctagcttggtccacgctcagagcattttggccatttgggccactcaagttatcttgatgggagctgttgaaggctacagagtcgcaggaaatgggccgttgggagaggccgaggacttgctttaccccggtggcagcttcgacccattgggtcttgctaccgacccagaggctttcgcggagttgaaggtgaaggagctcaagaacggaagattggctatgttctctatgtttggattcttcgttcaagccattgtcactggtaagggaccgatagagaaccttgctgaccatttggccgatccagtcaacaacaacgcatgggccttcgcaaccaactttgttcccggaaagtgagccaagttttatcagtttgtattttgcttnnctttcagtcttttgaattcgagtgagagacatgaggagaaagagaaggttgtatgtgatggtttgagactttcagatgtaaatttgcaaga

SEQ ID NO: 439 - DNA, 914 bp, Arabidopsis thaliana
gtttcacttctcataggttattcttacaggaagtttcaacatctttctgtaaataagaaactcatagacatcgtgcaacacagataagaagaaaccaaaaaccgatatgaagagacaaaacatcctaataataaagtaaacaaataaatttgttggtactatagtcacaaacggttactcttcaacttggtaccaggaaatgtaactaggtgtttcagtgtgcaggcattatttcttacggaatgctcatcactactatagctttaggctttatctggcaggaggtggagggccaagggattttgccatgccaacccaagcaacaatcccacaagcgagaattatccaaccgcatacatcataagtgaattcagtgttcctcttcttcttcttactactctggctaacattagatgaagccattcctcctccacctcctcctcctcctccacctagtatttgctgtcccattccttgattcataaactgcatatgcagttccggggcctttagtgaggaatccaaggacttgcgatatgtgtcattacctggatcctcattttctgctctctggaaatattcagtggctttatcaaagtgctcttttgcttcttcaggatcgtgaacataaaacgcgtgggcggtgtacgcgttggcaatacaccaaagagcctgatgcttccctggatttattgtcaaggcctcttccaacttggaaatagcatcatttaacatgagcttagcttcaggaataggctggaactgtgaaagttcaagtaaagctccaccccatttcagcagattctcggaatcaagaggatcgttcttgtactgagcctcagaatttttgcgagcatgttcgaacatgataaacctttcaaagtcggcggtagagaactccatcttcagattca

SEQ ID NO: 440 - DNA, 914 bp, Arabidopsis thaliana
  misc_feature (1)...(914): n = A,T,C or G
tttttggtaaacagaaagttttattctcaataattggaattaatagattaaggnnnnaacttaaaagagatacatcttagaggacagaaagaaacaatttttgnnntcaataatacattattgaaacgatttttggggatcaataatacattaatgattagctaatagggtatgtgacgtgcatagcacagtttcaaacacatttaattcaacaatggttgctcgtcgtcagcgactgggacatgtggacggtcaatgaggacattctcgtagatgaaaccggcgagtccaccaccgatcaacggtccaacccaatatacccaatggtcagtccagtttccagagaccaaagcgggaccaaaagaccgggcggggttcatggaggcgccagaaaaggcacctcctgcaaggatgttggctccaacgacaaatcctgtgagaagtgggccgaacccatcaagggatcctttcttcggatccacaatagtggcgtagacagtgaagagaagtgaaaatgttaagatgatctcccatatgatcccttgcgtgtaactcactccacttgccaatgtgtgaaccggagttcccattcctccggtgaggtaactgaggaggaagcatgctgcggaggaggccaacaattgatcaatccaataaaggaatgcacggaatacgctgatgtggccacccaagagtagaccgagggtgacggcggggttgaggtggccaccggagatatggcccnnngatatcattaccgccacnnngaatgcatgagccaccgcgaccgcgaaaagtcccaccaatgtgtttccgactaaactgtcagtggccatggcagatccaacaccagcgaagacaaagagaaaggtagtgatgaattcgacaatgagggctttaatgcagtccggttt

SEQ ID NO: 441 - DNA, 913 bp, Arabidopsis thaliana
  misc_feature (1)...(913): n = A,T,C or G
ccacgcgtccgagaaactgaaggagttggagaagaagatgaaactagctggatacaaaccggaactagagtttgctttacacaatgtagaggaagagcagaaggagaagctattgttatggcacagcgagaagttagctgttgcctttggttgcataaaactccctgaaggttcaccaatacaagtgttcaagaatttgagaatctgtggtgattgtcataaagcaatcaaatttatttcggagatagagaaacgagagatcattgtaagagacaccacaaggtttcaccatttcaaagatgggtcttgctcttgtggcgattactggtgaaaagagaagagctttgactctctcattggtcaaacctgactgtatttatatgcgttattgtgtggtaaagtttcgacctttgactttacaagttggcgttaagaagagagatgcgtagatcagcgagtggttctagatttttggatcattttccggcgacttcaaggtctccgcctcgatctcagagtgttacagctatggaagatgatgtggagctgcttttgcctaggtacgatccgaattcacaagcggggaagagagagaagtcaagattcagatttgcagaaaacgncnnncatttgattcctctcattcttcttctctgtgttnnnatnctctggctctcctcttattcagcagcgttaaggagttgagttcaagaagcaacatgttgtcttgtctccatggaaactcatcatattcagttttgggaaaggaaacaattattttaccgccggtgattatgtgccgcaaaccatacgtaactcttgtaatttttggttctgtagacacataaaaggatctctcgttttcatgaaatgtatgtttaatagttcactataaaaaaaaaaaaaaaaaaaa

SEQ ID NO: 442 - DNA, 913 bp, Arabidopsis thaliana
ccatgggtcgtgtcatcagagctcaacgtaagggtgcgggttccgtcttcaaatcccacactcaccaccgcaaaggtccggctaagttccgtagcctcgatttcggcgagagaaatggttacctcaagggcgtcgtgacggagatcatccacgatcctggtcgtggtgctcctcttgctcgtgtcactttccgtcatcctttccgtttcaagaaacaaaaggagctcttcgtcgccgccgaaggtatgtacaccggtcagttcttgtactgcggtaagaaagctactctcgtcgttggaaatgttctccctcttagatctattcctgaaggagctgttgtctgcaacgtcgagcatcacgtcggtgatcgtggtgtcctcgctagagcttctggtgattacgccattgttatcgctcacaaccctgacagcgacactactaggattaagttgccatcgggttcgaagaagattgtcccaagtggatgcagggctatgattggacaagttgctggaggtggaagaactgagaagccgatgctcaaggcaggaaacgcgtaccacaagtaccgtgtgaagaggaactcatggcctaaggttcgtggtgtggctatgaatccagtggagcatcctcatggaggaggtaaccatcagcacattggtcacgccagtactgttaggcgtgatgcacctcctggacagaaggttggtcttattgctgcaaggaggactggtcgtctcagaggtcaagctgctgcttcagctgccaaggcagactagagttaaaagagataaactttgtttctcttgttttctatgtttcaagttttgttgtctgtgtttccttttgaacctcattctgaaatcctaaaagatttttatgataaacctttctctcttctcgaaaagcttat

SEQ ID NO: 443 - DNA, 912 bp, Arabidopsis thaliana
  misc_feature (1)...(912): n = A,T,C or G
acgaagtcttgcaaaagtgattggaacagcaataactgtgggaggagcaatggttatgacgttgtacaaaggtccagccattgagctctttaagactgctcatagctctttacacggcggctcctcgggcacctcctccgagaccactgatcagaattgggttaccggaactctagcggttatgggtagtatcaccacttgggcaggtttcttcattctacaatcgttcacgttgaaaaaatatccggctgagctttcgctagtgatgtggatttgtgccatgggaacggtcttaaacaccatcgcttcgctcataatggtgcgcgacgtaagcgcatggaaagtcggtatggactcgggcacacttgcggctgtttactccggagtggtttgttcgggtatggcgtattacatacaaagcattgtgattagggaacgaggtccggtttttacgacatcgtttagtcctatgtgcatgatcatcactgctttcctcggcgtgttagttttggctgaaaagattcaccttggaagtataatcggnncgannnttatcgtcttcgggctatatagcgttgtgtgggggaaagctaaggacgaagtgatatcggtggaagagaaaataggaatgcaggagctgccgatcaccaacacatcgacaaaagtggagggtggtggtattaccagtgaagtaaacgaaggtgtgactaacaatacccaagtgtaaccccaataaagcaattaagagaaatttttgaagaccaaatttccaagaaaggaaatttgtttgtctttcttgtttgtnntatgctgtttacattttcaagttatctgtgttgattcaactatataacgaatgttgtatattttctgtaattgtcgaatatcacggaagttgaagaaatttcaatt

SEQ ID NO: 444 - DNA, 911 bp, Arabidopsis thaliana
  misc_feature (1)...(911): n = A,T,C or G
ttttttttttttttttttttttttttttttttttttttttttttttttcaagaccaaccttgttcacttatattaatttaatttatttaatttattagtcaccggatcacaaattatcgaaataaattatatgtatttgtatgtgtttgtagaatgatacaataaaaatttaaccgaagtagttgttctcactttcaatgttgccgtattctaagtctcttgtggttggttgagagaaaacacaagaagatggagaaggaggatgagccgttgtaggttgtggtggagttgttggtctttgtggtggtggtgcaatcacggaaacaccgccggagttgtgaaatccggcaacttgggagttggaaggtacgatcaaagtggcgacagcttctcgttgcttgtacttaagaatctcggatcttacggccgtgagctcggcttgtaaagctggacttgttgttgtagagctgagatggctcccatgcatccgtacaccggatctcttagcctcacgtttgcttcatacacaaggctattcgcggcatctgctctctggctcncaggtacttccattagcatcttggagacgttactagctccaaagactttgtggacggaagcgaacttatgaggctcgtgtggggagaaatatggcgaaaagggacattcttgagcacatctacggcgcaaaagcttgcaggcagcacaaggcgtaatggtattgagggttccgggaggacccgacattggtcttctaattccagccatttgatgaggccaagcatctgcttctcttttgatcttcttccctatctcttcaaatctctccctttctcttgacattcaggcatgctctcagcgaatcgcaaagagaaaagaaaagaaaaaacagagaaaaggagaaagaaaca

SEQ ID NO: 445 - DNA, 911 bp, Arabidopsis thaliana
  misc_feature (1)...(911): n = A,T,C or G
cttttttttttttttttttttttttttttttttttttttttttttttttttttatnnnnntcttatataccatagaatctaacacaaacattaaagtagtcaagcaagacaaatttaacaccaagtaatagtaaaacagacacaaactatatatggaacatgtggacaatgaaactagttcgcctttccttgtttcccttttatcagaccatcttggacttgggatgtgacggcaatagctgataacaagagataagtgatgaggcgaatccgaaagcacctgtgactcgggnnntgactttctttggggccaattgaagcaatccgaaagcaacaactacatccatccctgctttgatcagagccaatgacctctcgtttgatttctctacttttgcacggtattgctcattctggtgtttatccttgttccctatctctttttctaacttcttaattgatgctgacagcctaccaagctccccaacctcaaccaaggatgtgcaaaccgaagaacccatccaacagaaaagtgatatacgtccaagaatctcagcacgttctttgtccttgtaaatcccagtcctgccaagccacacaatttgatctaggaacaagaacgttgacagcaacgcgtttttagactttccgagcagaacaagcgggagtggagtccctttgggaacagggctaatgagagcatgaagatcatttacaaacttgaagagacggaaaactttcctagccaagctggtgttcttgtcgacattttgagcagtgccaggttggccatcactcaagaacttggaaccatattgaatagctcgacaaatcttgtctctcgcctccgctttattcaaatacacaactaccagaccaagctcagctcttgtggtctcaagggtactcat

SEQ ID NO: 446 - DNA, 910 bp, Arabidopsis thaliana
  misc_feature (1)...(910): n = A,T,C or G
tatataaatagtcacaaaccaacagagaaaaatacactggaaacaaaatgatacgagggcctcacaaagtattagaagacgtctggatggtaccgccccgggatggaactgttttgctgagcttgtttcagatgaagcgtcagagcatagttattcacctctaaagttctcaactgttcctggtattgagtgactagctgcctcagatgctgcaattcctgactttggtcttccgattctctttgccgcttctgctgtgtcactaccgctcgtttcagtaaactgttttcctgtacaatagcttctaattgctgcttcagcatcatgttttcctgttggagattttgcattgcgtcagtaccagtacgtgcattaattgacttctccaaagcttnnaatgctcttgcagcacgggctttggcgtctttcatgtcagaagcattcatcatttccctaacaaaaagctcaacccactctgtaccatccaagttcaagacatttggttcctccttggctgatccttgctgttgaggttcaacatttggttcctggattacaacaggagattggtttgtagcagaatcagaattcttattggcagattctaaacgaagctgattcaaacatctaatggctgaatcaaggtcatctccacattcctcgattgccctctcaagaatctgcttatccatatcggggaaaatcgcggcgaggtgatcgagaagaagtgaggaagaaggaggaatcggaggagaaaaacgagacgaagaagatgaagaaaagcaacggagtttcttggagacgggaggagaagcggcggctaagtcctcgaacagagatctcttcccgcaaacaatcgcagacatgttatctgcttccccccttcttcttcttccttgagatctctcaa

SEQ ID NO: 447 - DNA, 910 bp, Arabidopsis thaliana
  misc_feature (1)...(910): n = A,T,C or G
aaatatatgtttcgaattttacttttacgatatgattcagggtgtaatattgtcctacaaacatataacccaacataatggcaaaaacacaaaagcaagaaaaaacttgtaaaaaaatcgatctagggatgtcaaggcaaactcgttttatagcttaggtgtatgaacattctgtttattttgagagccagtagatgattagaaacaacgtacaagcagcgatgacagcggagaggataagtgtgtcccgagaacgtttccttttaattgagccaagtaagccacgaatcactgggaatttgtctccgagattttttactttcccttgaacatctgaaaacagagatcgttgagagccaagaactgctcttgtcgcttgagcttgaccaatcacatcatcaatatgggatatacttccatggattgaagctctctcccttaacacntgcacacctggtgacatactaccagaagccttatattcacttatgtcatccctgacagaactcagaagctcagcgtgttctctcaacgagtttatatttccttttattcttcgaaactcctgggtatattcatgaagtatatccctgtgccttgctagtttttgagtaaccgatgttgtgggtgcagcagatgcagcacatctactcatggaatcattaatatccaacaacttctcaagcaacgattgaatttccatctccatagacttccatgatctccccgatccaacggttggagacccagtgtcaacatacccgccttgagtaaacctggcgcctagcttagcgtaagaagagagcttaacgtctagatctccttcaattttacgagcttcccgcctaagttcttcccaaccagattcctgcagatccagactcgattctgtcattttccgatcttcaac

SEQ ID NO: 448 - DNA, 910 bp, Arabidopsis thaliana
  misc_feature (1)...(910): n = A,T,C or G
ggcacttccaaatgagaaactaacaaaacttgttggtgagcgatggaagagcgctggtatcttaatagaatccgaggggagttttgtaaatgaagctgtcgagcttctcaaggatgggattgagttggtgacagattcagacaaagtacttttgaacttgctttcatatcctctacacgctacattggctagccctgaagctaagcctgctgtggaagacaaacttcatgaagtagcagccagcctcatagctgcttatgacagcggagagattccaagcgctttagaagaaggacaaggtgcttggcagaaatgggtgaaagcctttggcaaatccttgaaacgcaaagttagtcatctctctaatgcagttaataccgaaacaaaatctactttacttgagtgaacaaaccttacaagagattcttctgatgctggttacagggtaaatcacttttcatgccactacgagtgttgttaacgggaaaactccatggtcctgagatgggcaccagtattgttctgatttacaaagctggaagtcctggtatagtggttcctcaagctgggtttgtgtccatggannaacggtttaagattcttagggagatagactgggaagctttgaacaaagatgagagtgtgcctcttgaatctacagccacagtatcaacctgagaaaactcccctttttttttttttttccttcaatatttggttagttggtgagagaaagacagcccagagattttgattcctcgtgcatttcttgtttcccgaaacaaatggcacaaagaaatttgtagattataatgtatcagcaaagcaaacttaggaacaaaccagagagcttgtaacattatcaggccagttttaatttgctttcaatgctctgttttcttaacaaaaa

SEQ ID NO: 449 - DNA, 910 bp, Arabidopsis thaliana
  misc_feature (1)...(910): n = A,T,C or G
acactaaccattaatggcgaaactgaaaacactcataaagaaaagaaagaaatttcgatggaattgagaaaagaaaggaagatttttttttttatgattatttagcaggaggaggaattgaatgaaaagagacaaatagaggaagcaatttttgnnnnngttttaaggttgagcaagnnntttgactattgcagccatgtagtttccttgatgttcagcaagagccaattctgtttctgttgcttctcttgacccatcaccagcgaacacacctgctccataaggagagcctccacgtatcgagtccatcttgaacattccagctccaaatgtgtagcctattggtacaaatagcatcccatggtgcacaagctgtgtgattgctgtccatgcagtggtctcttggccacctccttgagtgccagtgctcacaaagaaaccagcaggcttaccagcaagactctgctccttccacaatgatcccgtcgaatcaaaaaacgccttcatctgcgcagccatacaaccatacctagtcggaaatccaaacagaaatccatcagccgccgtcaattccgccgccgtaatctccggaatctccaaatccttaaccggcgccttcatctgctcaacaacctcctgcgaaagcgtctccggaactctgtacaacgtcgcctccactccttcnangctatccactccctttttcatcctcttcgctaagctctccacatgtccgtacatcgaatagaacacgacgaagatcttgagcggtgacgagatcttagcagccgtagtagtaatcgctggtgttgttgttcctccagtattcgtcgccgttgttcgatcgccgtcaatggtggtttgatcatcgtcaatttggatcggagcattagtagcgtcgttatcatca

SEQ ID NO: 450 - DNA, 910 bp, Arabidopsis thaliana
  misc_feature (1)...(910): n = A,T,C or G
ccacgcgtccgtggctatttttcaaagtgaattggaaccaatcatgcaaagaaagaaactaaatttggagatacgagaggacaactttccggacgagtgtttaaatcaacctattaatgctcgacttttgtctatctatacggatgatttgttctcatcgaaatggttggaaatggattgccccaatgttgaggctttagttcttaatatctcctcattagactatgcattgccaagcttcattgctgaaatgaagaagctaaaggttctgacaatcgcaaatcacggtttttatccagcaagattgagtaatttctcgtgtctcagctcattaccaaacctgaaacggattagatttgaaaaggtttcagtcactttgctggacattcctcaattgcaactcggcagtctcaagaagctatcatttttcatgtgtagtttcggtgaggttttctacgacacagaagatatagatgtctctaaagctctatcgaatttacaagagattgacatagactactgctatgatcttgatgagttaccatattggatccccgaagttgtttcattgaagacacttagcatcacaaactgtaacaagctctctcaacttccagaagctatagggaacttgagtagactagaagtgttgaggatgtgttcttgtatgaatctctctgagctgcctgaagcaactgagagactcagcaacttgcggtctctggatatttctcattgcttaggattgagaaagttgcctcaagagattggcaaactacagaaactggagaatatctcgatgaggaagtgttcgggatgcgagttgccggattcagtgannnatctagagaatctggaggtcaaatgcgatgaagtaactggattgttgtgggaaaggttgatgccagaa

SEQ ID NO: 451 - DNA, 909 bp, Arabidopsis thaliana
tttttaaataatgctttttttgttctttatttatttacatgaaacatatattaaccaaacataaaataagattcgcaaggcaacaaacaacacgcacaagcttacaaacaaagacccaaactcaacatacacatacacacacattcacacgtaaagattacttctgctttcagttagttccttggcttattaaaccaagatttctcttgatcacatgccattttccaagcctctctactcgtaatctcatccacccacttacgcactttagatcttttttcgaacaatttcttcgttggagttcccaaaaggtattgtatgtttggtaggtgatgaagatcaaccaaagtaaagctattacaagccaagaatctagattcttcgagtcgtttctcgtagatatttagaactttctctagaatagcctcgttctctttgacgattgtttggtcagtctctagaccgtagataggcttaatgacttgttcccaagtgagtttcgatgcgggtggatcaaactgatgagcttcgatttccatccacattgttagagttgccattgtctcgtgacttctaagattcagaagctgtgtgcctcttgagctatgaacatatgcgatgtattgtgtgatggctcgggattcatacagcttaacacttccatcctcaaaaacagggacttgaccaaatgggttgagagagaggaaaggttcggttttgtgttcaccggtttgcaatttgacggtaataggctcgtaagagagtcttttctcatggagaacagcgaggacacgccttgtgttggtggagaaaggatcgccatgaaccttgtaaccgagctttttaacttctgcctcacgtttccagtttggaaataacttgaacaccatctgtaagcagtccatatat

SEQ ID NO: 452 - DNA, 909 bp, Arabidopsis thaliana
ctttttttttttttttttttaacagaaaactgatgatcttataggacataactacttaatacattatacatctatagattgtgtatgtgtccgtattatacataaaatctcatgtatctttacatcaaacttcaaatctaaatacaaaaacaaaaagaacatcactagagatggatctctcgtcggacaaaaccccgaagtttcgtctttcacggtcaactttagtcaaactccgatccgaatcaaaccaaaaagggtttttcattcatcgatcatagtcatcatctcctttttagacaaaagattctcagcttctctggatcataaggaagagtctagagcaggagcgtcggatcccttcatgattctgagtctcttacaagaagaagagaacatgtcccatggaacatcaccaaccaacatccagtcaccatctttatcttcgtatgttggtacaaatccagatcctttgtatccttctctctcacaatattcaccaatcatgactttgaacatattctctaacgctttgagaagctcggggtagtttttgtatgtcttgagatcgatcttgcgaaggtaaggagctccgtccatactcactttcacgtagctcacactgttgttgttcttacgggaagatctcactggtggccaaccaacgatttgagttttggtaggaggtgtagattcttcttcatcacgagtttcctcaaatagacgcttgttgttaattttaacgcaagaaacctcttgttcttctttgatcttctctgttcttccgggtaatccaagacatagctctgtgtccttaaggttaagctcgttgactttctcgtacgccattgcttttggatcaatatcaatctttgtgtttccttcttgtgtgttttcttgggtactttgttc

SEQ ID NO: 453 - DNA, 909 bp, Arabidopsis thaliana
aaaaggaaatggcttcggttcttctttctgctcttcacatggagctattctcaactgaagatttcataaacggtttcattatgctcctggaatcggcagaagacacagctttagatatcatggacgcatcaaacgaacttgctctgtttttagctagagctgtgattgacgacgtcttagctccacttaaccttgaagatatctcaaccaagctgcctccaaaatcaaccggaaccgaaacagtccgctcagccaggtctcttatctccgccagacacgcaggagagagactcctaagaagctggggaggtggaaccggctggatagtggaagatgcaaaggacaaaatctcgaaactcctagaagaatacgaaacaggaggagtaacatcagaagcttgtcaatgtatccgcgatctagggatgccttttttcaaccacgaagtagtgaagaaagctttggtgatggcaatggagaagcagaatgatcggttactgaatctgcttgaggagtgttttggtgaaggattgattacaactaaccaaatgacgaaagggtttggtcgtgttaacgacagcctcgatgacttgtcgcttgatataccgaacgcgaaagagaagtttgagctgtatgctagtcatgccatggacaatggttggatccttcccgagtttgggatttctgcaactcagtgattagtggttctcttatcagtttcttgtgtttgtgcttacgatactttcctcactatctacatatatgtatggattcagttagtagataaacatgagatgtttatatgttcatgtgtttctgtctggttgttgtgttttgtctttgtactgatatcttttagtgtgttctaatttctgatggatttttgttacattgaaaataagttattagcat

SEQ ID NO: 454 - DNA, 908 bp, Arabidopsis thaliana
ctttttttttttttttaattgaagaactgtagtatatgattctttttgctccttcattcaaaattcactgcgctttcatcctcaactcattggagggaaacaatttagataacttaaaaagcaacaaagaaactaaaacataaaaagacaacaaacaaccaccaaagcaacaaaaagagaaagaaaaaaaaacgaaatttaaaactctataaaagcagataaatgtaagaaactccatctttgtataattgatcaaatcaaggttgctgcttagcatccatgtatccagcatcaacaagcactttctccctcttagcaagctcaagatcttcatcaaccatcatcttcacaagcttctcaaaccctacttgtggtttccaccccaacacttcctttgccttgcttgcatctccttgaaggttatctacttcagcaggcctaaagtacctctggtcaatctcaacataatctttccaattgagtcccaaatacccaaatgacacatcaagaaactcttccactgtgtgtccttcctctgttgccacaacgtaatcatctggcttctcttgctgcaacatcaaccacattgcttccacataatctcctgcaaatccccaatctcttgacgcttgcaaattcccaaggaatagcttcgtctgcaaaccaaccttgatccttcccaatgctcttgtgatcttcctcgtcacgaaattctcaccacggcgaggtgactcgtgattgaacaagattccgttacaagcgaagagaccgtacgcctctctgtaattcactgtgtaccaatgagcagcgcatttggaagctgcgtaaggagatctggggtgaaacggcgtcgtctccgattgtggaggaggagttgatccaaacatctccgaagatccggcggacgc

SEQ ID NO: 455 - DNA, 908 bp, Arabidopsis thaliana
ttttttcaatgccaagaaagggtctttaaaacgaaattacagaaggaccaaatgataaggaagaaaaatgcagagataaaagtaatatcaattaggatcatatgcttcttattatcaatgaaaagtaacagaaacatagatgctgcagaaatcttctgaggagaagcttcaacgcctcagggtgtggagaatgtattcagcatagaggtccattgagtactggatagcttcaaccgcagactcagatggcagaaaatcattcactgcaacttccttgttctcgtttttcttgtagtcttcgaagaaacgacggatttcagagagacggtgaggaggaagttctttgatgtcagtgtagtgcttatattcaggatcatcaacacacactgcaatgatcttgtcatctttttcaccctggtcaatcataggcattaatccaatggctctggcacgcagaaaacaacccggaagcacaggttcctgcatgatgactaagacatcaatggggtcattgtcttcacacaatgtgcgaggaacaaaaccatagttgtgagggtacacaactgatgagtagagaatacgatcaaccttgatgagtcctgtctttttgtcaagctcgtatttgaccttgcttcctttagtgatctcaacaaccacattgaaaatctgtggagctccaggtccaatctcaagatcatgccatggatgagcagctacggatcttcttgacaaggatgagagaatcctctcgttaagacgaggagctggtcgctgcagcctctggttatctttagtttcttcactcatctttggatcgaaacgaaacagccgattgttgttttctttatcgcaaggatgatgaagaaactttgggagagaaacaagtgaagcccgttgcggacgcgtgg

SEQ ID NO: 456 - DNA, 908 bp, Arabidopsis thaliana
agtctccgtcttctattaccagatcgagctttgttcttcgagcttctcatctctttgttcaatctcaaaggtttttgagtatcagcaaagatgggtgacaatcttatggacaaagttaccgcatttggtgagcgcctgaagatcggaggttcggaagtgagcaacaagatcagtgctggtgtgagctcaatgagctttaaagtgaaggaactttttcaaggtccaaacccaactgataaaatagtcgaagatgctactactgagaatctagaggaacctgactgggatatgaatttggaaatttgtgatatgataaatcaagagacaattaatagcgttgagttgatccgtggtataaagaagaggattatgatgaagcagccgaggattcagtaccttgccttggttttgctcgagacgtgtgttaagaactgtgagaaggcgttttcagaggtggcagcagagagagtccttgatgaaatggtaaagctgattgatgatccacaaacagttgttaataaccgaaacaaagctttgatgctgattgaagcttggggagaatcaaccagtgaacttcgctacctaccagttttcgaagaaacttataagagcttaaaagcaagaggtattcgcttccctggacgagacaacgaaagcttggcacctattttcactcctgctcggtcaactccagcaccagaactgaatgctgatcttcctcagcatgtgcatgaacctgcacatatccagtatgatgtgcctgtaagaagctttactgctgagcagacaaaggaagcttttgatatagcaagaaacagcattgaacttctttccacggttctgtcctcctcgcctcaacatgatgctttacaggatgacttaacaacgacacttgtacctcggccgcg

SEQ ID NO: 457 - DNA, 907 bp, Arabidopsis thaliana
catcattaagtgccaaattcacatcaaacgtcaatattacacaatcacgagtttacaaagcagagagattatgaagcaaatacataagataattactttccggggacaaagttagtagcgtaagaccaggcgttgttagccacaggatcagccaaatgatcaaataagttctcaatgggacctttaccagtaacaatggcttggacaaagaatccaaacatagagaacatggcaagacgaccgttcttgagctccttcaccttcagctcagagaaagcctctggatcctcagccaagttcaatgggtcgaacgcacctccgggataaagcgggtcaagtccttctccgagtggtccacctccgattctgtagccttcaatgaaccccatgagcacaacttgaacagcccagatggctaagatgctttgcgcgtggatcaagttagggtttccgaggtaatcaagacctccttctgagaaaatctgagagcctgccttgaaccacacggcttctccgaatttaacaccgttcttggagagaatttcagggaatgtgcatccgagagcacccaacatagcccatctgctgtggattacttcaagctcacggttcttagcgaatgtctccgggtcagccgagagtccagcggtgtcccaaccgtagtctccggggtattctccagttaagtaagacggtgtgttctccgagaatggtcccaagtacttgggacggtctggtccataccaaatgctttggggagtagacttgacggtacgacgcatggtcacacggccaccgcccaagacgcccaccttttggatgaggtcgctggagggcttgagagccgtttggccggcgaaggaggattgttggatagctgatgtggccataatcgtaatctttgttt

SEQ ID NO: 458 - DNA, 905 bp, Arabidopsis thaliana
tttttttttttttttttttttttttttttttttttttttttttaacataaacatatataatcatataattataacaaaacacacaccaatacatgacaaagtacaactcatatatatatgccccaatatatatataaagtttatatttatccttccaaccaatcaaagatgcatgtactataattacatcatcacaccaacccaaaaacaccaaaatgggctaaattttaaaataaaaagacaaaaaaggggcatctaattattttaattaattttattaatcaatacatattgatatcattagccataatgggttggttagtgtaaaccgaaccaccccaatgattaacattactcatcatattcatatcatcgtaatatccgtcgatcccaaccgtacgatcatcaaaaccacagccgtcgatctggtcaacaccaaatcctgcaccgttggattgaacaagatcaacgatctcgttgagagattggagtctggtgctaagctcctccatctgagcggtgagaacagagttctcggcttggatcttcatgtaaagctgagatgttacggtgaggctgttcaagatctgacggttgtcgtttgatagctgattgatctgagccgttagatcatcaacgtgtttctgtttacgcatccttgacctacgtgcagattctctgttcgataacattcttttacgttttcgttcgtcgacggtgacgacggagtccgacgggttattattaccaccgtcggaagagcttgagctccggtatgtgctgctagatgacgccattgatttttaacaagaaaagttacaagaagacaaaaaaaggacagagttttatgttttatgtttggttttttttttatgatctgtctgaaaaaattaattagagtttgt

SEQ ID NO: 459 - DNA, 905 bp, Arabidopsis thaliana
  misc_feature (1)...(905): n = A,T,C or G
taaacttgataataagggcgagttgctgagctcttcttggaaatctaaactagcatgatgatcggggaagcttatcaaagccgatggaatgtcgaatccttgattagcatcaggaggatattcatctatatgcagaaaacccttatcatattcaattgatatggctacagatttcacttcacatggtagttccaacatcatctccatcatgccagatgacaccttatccgtagatggtgagacattgatcttctttaagacatcactgtctgtcttctgttgttgatccacaaagatttgtagagtatgataataaaccttaatataccatgggaaaatctggaagatatttgcttttattgtannnnnnncattagtgagatctctgcctgataacttctcctgagattctgtcgcttttaacaagatggctattgcanntctttcgttcccgcttcccatcaaaaaccgactcgagtgtaatggagcttgttgacatgaccactttgagggacgcttccaagtaaggccaagatcaaatggctcgctgtcacttgatttgtcaatatcaaaaataaaaagaaagctgcagctttctcgaataaccctctctggcttaagagacaattcaaactctgcattcttccatagttggtgtgcttctatttctgtatccacgttttttgattcgtaaccaagaagaccttccaattgaagatacacattacttgactttgcaagaacacatctcccaacaacttgtctcccaaagagggagctgagggaccaacttggctgcatatttgattcaacagaagtagtctcaggctgaagaacaacagtaagcgtctgctccagcactataccagaacccaatccctcttgaccagattcaaccgcggacg

SEQ ID NO: 460 - DNA, 905 bp, Arabidopsis thaliana
ttttttttttttggatcgcaaagacatcttttatggtatatatcacaaaaaacaaaaacaacaagaaacactcatatgactcagactctacaaacatcatcgtatagcgtttacagatctcacgcgactgcaagctttacattaacagcggctacaaaggcagcccaagccaaacacggctttaccagattaccagcgaccggacttatctcattaaaggccttgtagcatccgaataacgcagccgattgacccaaccacaccgcaagccccgctactcccgacccgacgcggaacgtaaccggatcccaaaccaaacagagcaaaaactgagctaagtaaagatacagagcattgggcttcttgtggaagccaccgtcaacccatacaagccacgcagccaaacccatcagaccactagaagcgagacacgttgtgtgtaggagccacagaggtgggatccacgacgaggacttagctcgattcccgtatccgtcgcttgtgccgaggaaatacgtagcgaagagcgtcacgagcacaggagccgcaaccgctaccgtcagagacttgagaccacgtttcgccatcgccctcttttgatcgcgttttcctttgttgtcgtcagcgcttttcctctctgtctcggccatagccgtcgttgcagcgtctctgtcgtctccgccgcggtatctgatgtcctgagaatccattacaaacgtccaaaacagaatcgaaggaacaagattactgagatttgagatgttggatagatggagaagaagcagcttggtcaaaagagagtataatcaggagatgatattaatagacaagaagaagaagcaaaaaggccaaggctcttgtacacgtggcgagtgatatgtacacgtcgaatgctaattaattgt

SEQ ID NO: 461 - DNA, 904 bp, Arabidopsis thaliana
  misc_feature (1)...(904): n = A,T,C or G
tttaaatttcaacatcgaatcgacttcagactagcagctttgattgtacaacccaaattgtagcaaataatgatgttcttatgactaaagttgaggaaatggtagagacaaaacaaaagaaagaaggttttttgagaacaagacctctctcgggaatcgaatttcacgtttgtttgttgtcaggtttcttttagggccttaagttttctgtaacctttatcggtgccaaagatccagtccatgtaaacaaacgttgatgagtagttgccagactttgtgtagagtaatcgatgatggtagtcatggaagtcagcaccgccgtatagaggaagaaaattcgaggggctccatgggaaatgataaccacaatgtgcctcaactgtctcaataactctgagcatcatccataaccaaagggtgatcaggtgaggcccggtgagagccggaccaacaatggtagcaaaaccaaggaacagaatttcagcgggatgagcatattctgatgtcaaaccaaacggtgtcgcgtactcatgatgcacactgtgcacgttcttgtagagccatttagtatgcaagatcctgtgaccccaatagaatacaaaatcctcaatgatgaagtagaataagatctgggcagacaccactttccaggacggcagaggaaaactgctttccatgcccatgaatctgaatacaggatacgacgccatcatgaggggcaagtttacgcagcaatggtaaagtaatagtcgagcaatgcattttccctgggcttcaggagtattacttttggtctgaattttgtagttgctcnnnnnaccagtcctttctaggaaaatgtaagggagtccagacaagaaaaacacgctttcatgaagtataaaactcccaatacacgcccgga

SEQ ID NO: 462 - DNA, 904 bp, Arabidopsis thaliana
  misc_feature (1)...(904): n = A,T,C or G
catgagcacccaaactccatctgcaccttcagcacctgttgcagctgcactttcccctgtcctgtggcagatgaatttgccagataggttcgatatctatagcattggcctcatcttccttcaaatggcattcccatccttacgatctgacagcaacctcattcagttcaaccgccagctgaaaagatgtgactatgacttaacagcttggagaaaactagtggagcctcgtgcaagcgctgatctccgtagagggttcgagcttgtagatctagacggtggaatcggatgggaacttttaacatcgatggtccggtacaaagcaagacaaagaatcagcgcaaaagcagctcttgctcacccatatttcgatagacaaggattgctcgcgttgtccgtcatgcaaaacttgagaatgcaatacnnnnnggctacacaacaggactacagtgaagcagcaaattgggtaatacagttaatggcaaaaaatgggacagaaaaagatggtggattcacagaaacacaactccaagaactcagggagaaagagcctcgaaagaaagcgaatgcgcaaagaaatgctcttgcatcagcacttaggcttcagaggaagcttgtgaaaacagtcactgagaccatagatgagattagcgatggccgcnnnaccgtttggtggaaccgatggatccccagagaggagtgaggacagactctacttacaatatatcatttttcatttcggtttcgatagtgtaaatctcaatgtatatcttattagcccttagtaaaatttctactacttgtaaaatcaagtaatcttaaagaaaaagatgtattgtacctaaatccacaaacttgggagtctctgactctgtttctgaagtttcataactttgtgaaaaaa

SEQ ID NO: 463 - DNA, 903 bp, Arabidopsis thaliana
ttttttttttttttttttttatggcacacacgaaccattgacttatcctgttttagacaattgcattgttcttcataacactttgcccgtcatgaaaaagaagaaaaaaatacatgcgcattcaaaaatcaacaaagatgagaccaactcaccaaagacaaccacgcacgttcgtttgttcaacacacacaaacaaacacatcacacactctctctttctaaacattggtattatatgttaagtagatgaatttcgagagagagtgcgaggcttaagggagtttagtagaagtggccataagtagagctaatctgaggtttctgcaagccaaatttgttcttacttgttgtctttagcatccgtcataacggttttctctgtctcttcttcctttacttcttcctcgtcgtagaatttttcatcttcatcatcgtcactacccatgtcatgatcgaagtattcttcatagaactggtcgtctgtgtcatcatcctgaccgttctccagcctctctgccgacttttgtctcattaacctttcttggatactgtctacgattgcagttcccatcttatggcaaccttcttcaaatatttcaagaaatccagcgacccatcgatctgcattctctacccactcgttgcgcagcatttttacagtttggatcttttctcccactctttcttgttgttctttgaccctctcctggagtttctttagcctcatattaactctaagtctcttttccttgacaaagctaactccaagatcttcccttgagtatcctctatccaagttacgcatgacatactgattgtaatctttcactattctcattattatatccgaggtcgatattccttcagttcgctgtgtttccttaaacctcccaactttcggac

SEQ ID NO: 464 - DNA, 903 bp, Arabidopsis thaliana
ttggtatggcgggaatgggacgtcacaacatcggtttaccgtcgcaattcgccgccgcgtttagcttccaccgtaaattcgccgtctgtctaacttccggtaaaggcgtcgccttcttcggcaacggaccttacgttttccttcccggaatccagatctcaagtctccaaacgacgccccttctcatcaatccggtcagcactgcttctgcgttttcacaaggtgagaaatcctcagagtactttatcggcgtgacggcgattcaaatcgtcgagaaaacagttccgatcaatccaacgctattgaagattaacgcaagtaccggtatcggaggaaccaaaatcagctccgtcaatccttacacggtgttggagtcatcgatctacaatgcttttacgtcggagttcgttaaacaagcagcggcgaggagcatcaagagagtagcgtcggtgaaaccgttcggcgcgtgtttcagcacgaagaacgtcggcgtgacgcgcctaggatacgccgtgccggagattgagcttgtgcttcatagcaaagacgtcgtttggaggatatttggagccaactcgatggtgagtgtcagtgatgacgtcatctgtttgggtttcgttgacggaggagtcaacgcaagaacctctgttgtgattggagggtttcagttggaggataatttgatcgaatttgatttggcgagtaacaaatttgggtttagttccacgttattgggccgtcaaactaactgcgccaacttcaatttcacttccactgcttgattaaattagttgatccgttttctttttttaaaactgttttttagtggttattatattatgtttgatgtgattaataaagagccaatggaatcattatttggcatttgttatcaaaaaaaaa

SEQ ID NO: 465 - DNA, 901 bp, Arabidopsis thaliana
  misc_feature (1)...(901): n = A,T,C or G
caactttaatagatgatgtttctttataagaacacagcaaaaagatttaagaattctgaaaactgacgaagtattataagaaatgccgcaaagaaaagttaggagggaagaaaaaagtgactcaatcctcctcttcggactcagactcagcgctctgaagccactccacaaaaggcttaacattcttccaaaccggcgagcttttgtcagctccggtgagacccttttcgtaccaatccaacactacctcttcctcaatgatgtcttggtcgtacaatgctttaagaaccagagccacctctttcaaagcttcttcgtttccattctttccacagaatgtcccaatcgaattgagcagatgcatctgtgatccatcctcttgcattgttgcagcagccgctaagtaattcttcttcttagtcacttctttggcgaatccctttcccacaccatcaaagagagcattgaagagtgcgtccatgatgtcttgaggnngttcagagagagacgagatgaaacttttgagcgcgcttattggtgaccctttcttcagatactctttcatatcctgcacgagattcttctcttgcggaggaggattctcagttttcnnaacgttcccgttagatttgcttttgggcgcctttttctcttctacttccattgcagagagcatcaccatttcggcagttttagcactcaactgttccatcattcttttctcagcagcttctcnnnnngtatcagtttgccactcgacaccatcatcatcatcttcatcctcatccacctctagagcattctcatcatgcttcgggcttatatcctcatcagaagaatggttcttagacgtcttagaatccttgccgttagacaatgctttcttcttagctttcagctt

SEQ ID NO: 466 - DNA, 901 bp, Arabidopsis thaliana
  misc_feature (1)...(901): n = A,T,C or G
tataggatacttttgacaattaagtattgaaaccatacaaaaacgaagaaaagaaaccaaataataatagaatataattctctcctcatctctaagaggaacgtagccactatgtttatagctaaatgcatcttcaatttaaaatacatctaaatttcctcaaagaactttctaataccgtttctcattctttattcccattctctagtttatctcttagtcaaatttaatatacatagtccaatctattgaactacttacccacatcagcttattagagctggtgtactagtacttcaatagattggactatatatattgnnntnnnccaagacatttctccaagaaaagacttaacacaaaaccaacgagattctataggttccggaacgcatggaacatctttggggagagaagtaggacgaaagccagaatcgaaccgaagaacatcttgacaatgtaactgaaagcatctgacgactcgctatcttctgagtcaaccactgcatttgggtttgacattgcttctgctgaaggaagtgattctatcactgcatcagctaagtcggtgatgaaggatggtgtgagacctagcgcgggtacccgtccccagttctctacccctgactcaagagctaattccctatactccatgtctatctcctcaagtgtctcaatgtgctcactcacgaaactgactggaacggctagtagactcttaacaccactcttaccaaggtcgacaagaacctcatcggtgtatggcttcagccattgaacagggccaacacgactctggtatgccaatttatggtcgttaagaacccctctggcttttagctcttccattatcaagtcaatacactcttccatctgcttctggtacggatctccagcattc

SEQ ID NO: 467 - DNA, 901 bp, Arabidopsis thaliana
  misc_feature (1)...(901): n = A,T,C or G
ccacgcgtccgagggagcttttctgacagatggctagattctttcttctctgttgcctcttcgcggcggtgctgacgtcatcattgacggaggccggcgacaataatcaagtctactcgccttgttcagattctactgttgcgatcggcgatggattcactttcggcattgccttcgctgcgaaagattctttcttcagtacaaatcgatccaaatccgttcagtactctccctgcgatcatcgccatctctcgctcaacggaaactctgaggtcgccgtgttcagacctaaagtcgatgagatcacactccttaccatcaatacctctagttcctccagtttccgcccggatgcttccaagggatatatggtagcattcgctggtgcaaaatacgctgcaagatcactcccaattatggttgcagacagcaatcacatcgtgacaagcttcacccttgttcttgagttccagaaaggaaggcttgagaacatgttctggaagaaagacggatgctcgaagtgttctggagattcgaaattcgtgtgcctcaacaaagaagaatgtgcgatcaagccgcaaaactgcaagaaccaaggaggacaagtagattgtagcttggggatncaattggcgttttcgggcacggataagcactacaccgcgttgaattcgtggtatgaggttgcaaatctgaagcagtactcgctctatggcctctactccaatctaaaggactcactaaccaacccattcaagaacatcttctgatgactttctttctcctttgtgtgttgctactcttgtaattttgtattattttttcacctgctttctttgtattatttcttccgtatgatttttgctatatattgtattttattacttgggcgtttaaaaaa

SEQ ID NO: 468 - DNA, 901 bp, Arabidopsis thaliana
  misc_feature (1)...(901): n = A,T,C or G
tatagcataattccacgtcagcatacaacaagctgacccaaacagaaaaatagaattcaaacaacggtcaattgtggataaccaaacggtgggtgtggagataacggcgataaaagcggcatgctcagaaactccgtcaaatcccagtcatctatcgccgtcaaacctgactcaacattctctccgtcgctaacggcgtaactctcctccttctttagcactttcttcaccaccttcacttcctcctcctcgctgtctctcttccgtttgtacagnnnacgaccatcttcagcgcgtggattccacttgtcaacttcaagcgggnnantcagaannnnnnntgatcctcgtagtctaaacgcttctttgtcgtaagctctagccgcttcgatcgccgtctcaaacgtcccaagccaaacccgagttccacgacgagtcggatctcggatctccgccgcgaattttccccacggcctcatcctcactcctctgtaatgcctcttctcttctgctgctacaaccggttcgggaagttccggtttaggatttccggttgcgaattgaatccacttggttcggttcggtggtgcgatcttcaacggcggttttcgattggattgaacagtgacacgaggaggattcgattggaacgtgaaggaatcgttcgattcaattgaaatttcagatttcacctcgaaatcagaaatctccggtttgggagtgacgagatcgattatttccggtttggtttcaaattcagaaaactcgaaaccggtttgatgaaatgacgtgaaatcgttcatccatcgattggtggtggcagtagtaggcaacggagacaattcgtcgaggagatacttcttgatgaggaaaagagctgatacttcgtttggtgtagcca

SEQ ID NO: 469 - DNA, 900 bp, Arabidopsis thaliana
ggagaaatgtcagacgacgacgagagaggcgaagagtacctcttcaagattgttatcatcggtgattccgccgtcggcaaatccaatctcctcactcgctacgcccgtaacgagttcaatcccaattccaaagccactatcggcgtcgagtttcagactcagagcatgctcatcgacggcaaagaggtcaaagctcagatttgggataccgccggtcaggaacgcttccgcgccgttacatctgcttattaccgtggcgccgttggagccctcgtcgtctacgatatcactcgtagctccactttcgaaaacgtcggtcgctggctcgatgagctcaacactcattctgatacaacagtagcaaaaatgcttattgggaacaaatgtgatctcgagagcataagagcggtgagtgttgaggaaggcaagagtcttgctgagtctgaaggtttgtttttcatggagacctctgcgttggactcgaccaatgtaaagacggctttcgagatggttattcgggagatctatagcaacattagtcgaaagcaattgaactctgattcttacaaagaggagctgactgtgaatcgtgttagcttggttaagaacgagaacgaagggacaaagacattctcttgctgttcgaggtaacatctttgtaacggtttctctttgtcctgaggattggtttcgggttgaattgtgttcctggtaaacttatagaaaggcagagatatattcttatagttctcagttaaagtaaaagaagaagagagaaagatgttttgagtttctttgttacgcatacagaaaaagtttggttagtgtataagttatgttctcatttgtaacttttgtaaacttatgattgttaaatcaattttgatattttccaaaaaa

SEQ ID NO: 470 - DNA, 900 bp, Arabidopsis thaliana
  misc_feature (1)...(900): n = A,T,C or G
atacagctcaagtcggttccgaacaaagaaataaacacattgcacaataaggctggtttcttcttttttttaaaaaaatatggaaggcactaaatgaagatgaatccaaagatgaagcatctaggcataagtgaagaagaagatgaagaagaccgaggtgtgtctaagcaaatggattgcctccagtaaatgcaacagggccttgtgctgctgaattcgttgatgcttgccctgccatgtatgctaagccaccttgtgcgactgctggagcaggtaagtacgagggtacagaatctgcagcgagccacggttgtgatacaccattaaggaaggcttgtggtgtctggatatnnngcagtgccccttgtaacgaactcatgtccaagaacatgtcatttgagtcgaactcagaatcataggggagatcaaatggattagctgacttttgttcatttacatgctgccaagcnncttccgagtatgatggtgccatgccaatatttcctggaaaaccaaaagcagaagagccagcagggattctggttgtttgggtgccatcattgcttaattcctctaaaacttgtgattccaaatgctggtgatcagtgttatatgacgaagtacttgctccatctacctgttggtgaatattcctactgctgtccaaaggattggcctcaatagagtcgggaaaggcattccacggctgcgggttatcgacaacatcttttagaacattcgagagatcttcctgccatggacttggtatcgacaaagcatgctggtccacagttgatggatagggtggcaattgcatgcttgtgctaggctgtagaatctcttcaattttcagttccaactggaaatctccaggggaggtaataacgtttgtagattttg

SEQ ID NO: 471 - DNA, 899 bp, Arabidopsis thaliana
  misc_feature (1)...(899): n = A,T,C or G
ttatgaaaacaccaaaagtattaaggaagaattgcaaaatatacatacaaaaattatactataaaaatcttatgcaagtgagacttatgccttatttcatctaaagaagcacgaatgtctaatcatcaagattacacactgatttctcgataactatatacaatcttccggtccctttcattttcctccaaagccaaagcagcaacatgaggaagtgttgttcgggttacgggagctttgatgagtcggcgttcttgaagatccactcacatttgctccagaacttctctcttcacggactttattgaagatatgcgtgtatccgtcagctgatgacgggttgttctcgtcccagtcaccgaatttaggcaccactgtgactttttcaggactttcatcagctctaaggttggtaggtttaggcctagattttccagtaccatcataagaattcttatgcaaaggtgacttgttgtcataactattgttctgagaagctcttccttgtcttttgttagcagcttcatttgatgaaccaccagcatnnccaaactgtttcaactcgctctcttctcggcttctcatatgctcacgtgatcttctaaccgtgtcaacttgctcaggtttggttctggaagaaggaggatgaggaggagcttgtgattgagagtcagagttatactccgggtcattcgggttcatgatcttgctaccgggtgctcgagtcttacgagctttgtcaaagtaagctgtgtaaggaacattctcctcagcttcccagtttccaaattttggtacattcgaacgtgccatgggagagaggtagctaaagaattgaagtctgaagcttttgttaggtttgagagagaaagacagagagagatgtgagaaggagagga

SEQ ID NO: 472 - DNA, 898 bp, Arabidopsis thaliana
tttttttttttttttttttttttaacaagagattctgataagctttttctcttgggttaaaaaggagtcaagagatatataacatacagtttttccgcgtatgtaatatgcacaaaccaaacgcaggaatagaggaagaatttggatttgatctttaagatctcactcattcttgattactttttgtcagttgtcactccaacaacaacattgctcaccaactttccgctttcatcaacggacatggggttttctacaacaacggtttgggtctgagagggtggtgttgaagttgatgtagaggggggacaagctgttccatttggccggttagttgggagaggtacccttccattgctcatactaacgttagttacgaattgacaaacagcgcattcgacggatgatgcaccgtaaggatacatgagggtcgtccgacaatgcccacaattgatctgcgcaacctgactggaaggagcatgggcaacctgattggagtgcgctggcacaaggttcgtagtttgacagcaagagcatcttacgctactagccccacgcgtatacataagcattgttctacaaccaccacatataatgtgtgccatgtcgtgaggtggaggaggaggaggaaccatgttgatagtgttacataacgcacaacgcacattagatgctcctctaggatacatcaataaattcctacaaccatgacacaccagctggtcctgcatatctgattaacaaaaagagctgattttggaacgaaacccaaatccaattcaaagccaaaaacttcgattggagaagggtaaggaatcgaatccaaaacccgcgaaagctagagcgatgatatgcagaaaatccaatccaaattgaggagatagacaatagatttcga

SEQ ID NO: 473 - DNA, 898 bp, Arabidopsis thaliana
atatgaacatgattattgatgatgtacaaacaaatctgtcaaagcattattgatgaagcaacaaggaaatgactttctttttttacaaacaaaagatatacatgtgattttgtcagagcattaatatcaacggccagcttcaatgtccaatgttgttacatttctgatgctgtcatagccaatgctgctactggtttcgccttgtgctgacaagatttgaacgccgagcaagtgttcaatctcccctgtctcacgatactgatccgaccacttatatttagttgttttaactctcaaggcctctaactctgcagctacttctttcatccttggcctttcctctcccattagccttgtacactctgcagcaattcttgcagcttcctggatctctctctggttatcctcattcatcacttgcccatcaataatttcatggaacctattattctttgtggcagaagcaaaacaactcactagattttttgggcaatgtggtctttcgaaacacaatgccttttgacctgagagcagttccattaggacgaccccaaaactataaacatcgctcttttcgtttaacaaccctgtgttgtaatattctgggtctaggtaacctagagtgccttgcactattgttgtgagctgctctttatccatcggtatcaatcttgatgcaccaaagtcagctacttttgcagttaagtttttatccaggagaatattagcagtcttgatatctcggtggatgattggaatagaagcagaagagtgaagatatgcaagacttcctgctacttctgttgctatcctcagacggtgctcccatgtaagtgaagaatcatacaaggaaccgtgcaagtgatcgaaaagggtacctgcccgggcggccgctcga

SEQ ID NO: 474 - DNA, 898 bp, Arabidopsis thaliana
tttttttttttttttttttttttttaattcaaaactagtcgcacacttataaccaatctaagaactacaaccattcatggtgagggtttcaattacactacaatcccagatattgattggaataaattatgcagtcagacatagagaactaaaataaacggtttatgaagaagaagaagaaggaaaagcaaaaataaataatgatttgagaatgagagaaagagaatttaaaaccaatctaaaccgggctatcagagcttctgatcatctccggcgaggaggctctgttaccagaaccaggaccggaccctgaaggtcgaatctcctccatcatgttaaccacttcctccattgaaggcctagaatctggatgcttagacacacatgccattgctatctgcaacatctgcaccatttcttcctctacgttgtgttgctgcttgatcagctctacgtcaaacacttctccagtccactcctctctcaccactgattgcacccactttggcagatccaccacttcttcatgcccagtagtcttccctgctgctttcccagtcagcatttctagcaacagtacaccaaagctgtaaacgtcggacttctgggtatgtttccgtgtttctatggcctcgggtgctctgtaacctaagcttcttgatgggatcaaggtgtgatggctcatcaatggagctataccgaaatcagagacacagacatgaagttcttgggttaagaggacatttggtgatttgatgtttccatggaggagtttagcaccagatgcagaatggatgtgagaaattcccctcgcagcttccaaacagatccttaaccttgtttcccagtccaacgctgctcttcctccctcattgtttcctgcatagcggacgcgtgg

SEQ ID NO: 475 - DNA, 897 bp, Arabidopsis thaliana
  misc_feature (1)...(897): n = A,T,C or G
ttttttttttaatgaaaataaataaaggattatataattagagacaaatattgaatcctcttaagattttgaaagttgattccactgtaagatacagctcagaagattcggaatcctcttaaacttttacatttcagtacgaatacttcctcctagaaaaatgactacaaaatcttgaatttggattccagaataattctccaaccttgctttatcccgagaccattcgtcgtttcggtagagctcacatcaaactatccacagtattgcaacaaatgatctcacaagaagaagaaagtccttgaacttgatcatccacaatagtttctgatgacataaaagtatgcataccatagatcacatctaaggattatgccctgtaaccttatacttcacgaatacaatttatcgacaaaaagactgaaactctagctaaacttcatcctcctaattgaaatcaaatatctcctaattccaaatccttaatcttcaccctcctaactccactaactaaacattcctaagtcaaaccaactatccaatatgtccagaagaaacagtataataaactcgaattgctacataatctatcaagagctagatttggacaagcaatagatcaaagcaagcttctttgactccttaagacaatgaaagctanaaatatatatgtatcaccaaatgctcaacatcttctctgattctataagcaaggatttaaaacaacagactctgattatattcaacactcccaaggaattaaacccaaaatcaaaacatgatctttctctgcacaaaaacgggaaaaataaaaactttacaacaacaaatcagaaaaaccggaactttggtcactccaaatgaagatgatagtaattatgatgatgagtaaccgga

SEQ ID NO: 476 - DNA, 897 bp, Arabidopsis thaliana
aaaacgaaaatgttggcaatatttcagaaagcttttgctcacccaccggaagaactcaacagtccggcttctcatttctccggcaaaactcctaaacttcccggcgaaactctctccgacttcctctctcatcaccaaaacaatgctttctctatgaacttcggcgactccgccgtcttagcttacgctcgccaagaaacctctcttcgtcaaaggttgttctgtggactagatgggatctactgtatgtttctagggagattgaataatctctgtacattgaatcgacaatacggtttatctgggaagaactcaaacgaggcaatgtttgtgatcgaagcttatcgaacacttcgtgatcgtggtccttacccagcagatcaagttcttagaggtcttgagggaagcttcgctttcgttgtctacgatactcaaacttcctctgttttctcagctctgagttctgatggaggagagagtctttactggggaatttctggagacggatctgttgtaatgtctgatgatattcagatcataaagcaaggctgtgctaaatcgtttgctcctttccctaatggatgtatgtttcatagtgagacagggcttaagagctttgaccatccgactaatatgatgaaggcaatgccgaggattgatagtgaaggtgttctttgtggagctagtttcaaagttgatgcttgttctaagatcaatagtatccctagaagaggaagtgaagctaactgggcgctggctaattctcgttgattttgcttctagtttcgttaactcttgcttctttgttgcgttttctttttatgtactcttgtttatgtaaatatagccttatgaagacgataaagaaataaaattgatttgcttcttcgtgaaaaa

SEQ ID NO: 477 - DNA, 896 bp, Arabidopsis thaliana
tgagaaacacaaaggaaaaaaacaaaagggattacatctctacataaacactaatcttaaaatcagatcgatcacataactttccatgattcgagtgttgggaagctcgggtaactatccaattccacggcggactaccaccaccaacgttcgccgtcgttgtacctgcacttgactgatgatgaaacgaaccggttggagctcccaaatctgtgataatgttctcttggtgatggttagacaaaaacgacgacgtatctagcgttggaacagctgaagatcggtccaagtttccgcacgacggtggtaatctactagcgagacggtgtggctccggcttcacaatcggtgcgaaaatgctgttggaagaaccgaggaacttagctccggtgacttgttgaaccatctgccggaaattagcagcgtccgccgttataaacgtggtttgagatttcttattagaaactcgagatcggcgtttcgtttgtttaccaccggaaacaccaggaccacgttttcgtttcccgagaccaagagcactagcggcggggatttctggatctgagccgaaagagacgttggagagagtttgaggaggagaaaaatcgacggcggcggttgaagagtcgaagaaagatgaaggagaaagaggagatgattcggtggaagtggagatggatctgtgaagagctttagcgagtatatcactgtcgtgtgagaaggaatcagagagtagccacgaatcgatgttgaagttttgacggaatgaccaaggatcaacgcttgctaatccctccgacgacgccatgattgttaagtaagtaaatcaccggagaagaagagaaaagagaatcttttttagtggatcattattgttgagctctgtttttagagag

SEQ ID NO: 478 - DNA, 896 bp, Arabidopsis thaliana
ccacgcgtccgcgatttttcgcctgaacctgcggatttttcgattcttcaaattcaatgtcttatgcttatctcttcaagtatatcatcatcggcgatactggagtggggaaatcatgtcttctgcttcagttcaccgacaagaggtttcagccggtgcatgaccttaccattggtgttgaatttggggctaggatgatcaccatcgataacaaacctatcaagcttcagatctgggatacggctggtcaagaatcctttaggtctattacaaggtcatactatagaggagctgcaggggcattgcttgtctatgatatcacaaggagggagacatttaaccatctagctagctggctagaagatgcaaggcagcatgcaaatgcaaatatgacgataatgctcattgggaataagtgtgatcttgctcacagaagggcagtgagtacagaggaaggagagcagtttgcaaaggagcacggtcttatattcatggaggcctctgccaagactgctcagaatgttgaggaggcattcattaagacagctgcaacaatatacaagaagattcaagatggtgtgtttgatgtgtcaaatgagtcatatggaatcaaagttggatatggaggaattccaggaccatcaggtggaagagatggatcaacctcgcaaggaggagggtgctgcggctgagatgggaaaaatatgtctatatcattatgtaaaaatgatcattatgtaaaaatgatcacatatgatatagcaaaaatgtctctgcttctttctatagttgtaaatcgttttggaattcgatttggtgactgttgtggttggttttggaacggtttgacaatacacgtgtatgcctattcatatatctaaaagttaagatgtgtt

SEQ ID NO: 479 - DNA, 896 bp, Arabidopsis thaliana
  misc_feature (1)...(896): n = A,T,C or G
ccacgcgtccgtctcaaatcttctagagagagaagggcttagtttttcttccgccatccggtgaatccggcaaagccatctggttgttaaaccagcttcagtccaacatcctccggctattatagaggaggttggttggcttttcactggcggtgttggctccctcagcaacgtcggccagttttctctccggcaacgatggctccgtagcaccgtttggctggctcctcttgtatgcggcatgttttcggctttctatgcgatggtgtccgcttttgtctctggtcattccaccgtcatctttccggtggttttggccagttatgtaccggtgttagatcnnnnttatttgtttctgttttacttttaataattctcattgagatgtgttggtgataatagtgatagcaatctcgatttctattgcttcttatccaatccactctcttttgagattcaatttgcaggaatatttacagagatttgagttttaagatgaagaaaagaagttgattccttcgcttattatcattgccttaagctgttggtttaattggagtttcgattactttataccggcgaaaaatcagaagaatctatgtcgattgttatcggttgtgattccttcttcaccggaatcggtgctcggacgacaaaggaagaagtcggttcacttttaggcttctcgtctcacacgtataggtctttctcctattgacgacacgtgatctgagatagagacaaattccagtttcttcttctgtaggaaatctctttgggccttgttgggtctaaataatttctgtaatcttgcattttgaaaaggcttttcttaggccttgtatgagttggatatgtttaatacaaaatttctcttgtgaaaaaaaaaaaaaaag

SEQ ID NO: 480 - DNA, 895 bp, Arabidopsis thaliana
  misc_feature (1)...(895): n = A,T,C or G
tggttactggacattcatgtgatcagaatctagctactttgtcttttgtttgactaattatttattattattaagtttctaaataagaagaacaagattagtttcacgtgaaaactaaatatgttcaatctaattaagcttaatgtgatcttgcaaagaaaagaaaaatcaatatggcgtcttcttgcttttttagtacttttacagttttactatataattggttttgtttagtcaatatattttgaaggcatgaactaatataaactatgattatgcagtctcatccgaaactatcatccgaggatagaacaaaactatgtcgatgtctaaactacaagaaattgacattggacacatgcaaacaacttgcaaaaaatcccaagatccctccaaatattgcagttcaagcactcaagtcacaacaattatcaaacgagactcgaccacactcaagagaggacaagaacaaagtaaacaagatctggaattcacgtaagtacttagaagagaaaccaatactggtgtgtttgaaaggttttgatatgtcggagaagtttgaagatgatctaatgatgaatttnnagaggaagcaatggaataattctgaaaaagttagtaaggagaagaagagtgaagtaatgtcaagatctgtgagacatggacatacacattcaagttctagttttccaaggctttgttaaataattaattcactcgtcatnnntttcttatttctctagatatagatttttatgtcatcatatcatcatcacacacatgcacgtctcgtgtatattataagctttttcatgcaaaatgtattttacgtagttttgagaatgcatataattatgtccttgtggatgcaaataaaatggatattttgtaaaaa

SEQ ID NO: 481 - DNA, 895 bp, Arabidopsis thaliana
ctttttttttttttttgtaaaagtgatcacaacttcttagaaacaccttaagcaatagcagcagtacagatacagaagaggagcgaattagggtttactcagatcacagtacataatctaaagggagaatgagtcatgcatatttagatccaacgattataagaagacataacgaacagctgaggaactgctaatgctctgtctcaatcaggatgtgcagtttaggaatgcaagtctactaaccttgcattacatatgatcttctagcgagccacatcataagcctggtctgcatcgtactgatttgagcgacaatgatatcactgtgctgttcctggagcagctgcatagccagctgattgagttgctgattgctcatagccggcctgaggaggtgcagtctgggaataagcggtttggccagtaggtgcagcatatgctgatgcgtttccacctccatagctaggatactgagagccaatgtatccatagtttccattgctttgagccggggtattaccataagccggctgtgtggagggatacgaactatagccaccggttggaggtacttgcccgtacccacctgaagtttgttgcacaccagaagctggctgagcaccgtgctgctcataagctggggcaactgctggtggttgtgtaccattataaccatcagatggtgctgcagagctatatgaaggataagtttgctgagtaggcgcacttgatgcataaccatattgctgttgttgagccatgtttgaaccatacgatggtgctgctggagttgaaccatacgatgctgctgctggtgttgaaccatatgacggtgctgctggtgttggaccttggtaaggcacatcaccaggaggtgctgcaggccttggaggcc

SEQ ID NO: 482 - DNA, 895 bp, Arabidopsis thaliana
tttttttttttttttatggcaaagtctcggtctactagatttttaagaaaatctgtcaaattgcaaagaggaaggccattgccaaaattcacattacggtgtcttaaaagtgtacatcacaagataacaagagacaaaaggaaaatttgcagtgttctcatgaattggttcaaccaaggatggggaagatgcgggcaatgtgttccaagggaacattctcacctgtatttttcttgagctccggatggttaaattcattttgtggtaagacaatacttccaccctctttctcaacaatccatccactgttagtcacttgctgctcgatgaatttgtctagagatgcaccatccatgttaacagcctcagccagcactgatcttggaaccttttggtagcttaagctaagaaggtgacttgcatatgcttgaatagcttgctcaaaacctggaacagcctcgagaatgtgacggttcttggcagcttcatcccagaactgttggaacctcccagtctcaaggtagtgtgatagaacaattagtgacttgaactgctcctccatttgcactctttcgggaatcaagaagaggcaaaggctgaagtctggagttggcatagccataagagccttgaccaagattcgagccacgatatgagtgttcatgcgctcaggctcaaactgatagagccgaagcaagcataggtttacttccagactatacgtttgcgatgtaacgttaacgtagttttcgagatcaggcaggatttcagggttgaaaggattaagggcgacgagctgctcaacggtgtaagagctctgttcctgcggcgattggatctctactcccatctctgcctctttctccttctccgtttctgtcccttttgcgtcggt

SEQ ID NO: 483 - DNA, 895 bp, Arabidopsis thaliana
cttttttttttttttttttttttttttttgtcgtcgttatagtttaataacttttacttggcaagagtacaagtacaagaaatatttgattgcaaaagcgtcttcttgtcttcttaataaagtcctcaaatgaattggtaaaggaaagctttaatctcatcaatataaggagactttgtaggaatgatgtggccaaaatcgtgctcaacaatggtggcgcaaccatcttcaaacaaccccgccaggtctgagctggcttgagtcacaatttgtctgtcttttccaggctgacttccgaatatgtgaagtgaagggcatttaatcgatcgtttctccttcatctccaacaatggccacggtgtgaaacccgagcacaacacgcagaatctgaagtctatttcacctacgagctgctcctgtttcccacatacagccgcagccattgctgcaccttgagagaatccgagaatgccatcaaaaggccctttctcttcaaatgccgtcttcaagtatgtcaacgatttatcaaacccttcagtttgagtctgatactgcaatggatcgaactggcattgggccactgtccagcctgtttcactcggtttatcaaaatctgatgacaccaaccacgcaaacttcttattgcatgctccggatggaggggtagcagtttggtagatgaactgtaattcgtgtggtgcatcgatgaacacaagctcggcaatattcttcagtttctttgctagtgatccggtcctccctttaaagctagacgcgttctgcctaaatccatgcaagcacaagatcctcagcttccgtcttgtattgtcaccattgctttcagaaggttggtttaagggatcaagactcaaagggacttcccccggacgcgtgg

SEQ ID NO: 484 - DNA, 894 bp, Arabidopsis thaliana
  misc_feature (1)...(894): n = A,T,C or G
tttttttactacgattttgtttttcctttattcacctgacatttccagtcgcaaacaataagccttagtgannncactgcacaaaactgcagcaaatgttgctctcaagacaaaagacattccgggggaaacaaatannaaaactcaggagagttatttaagataagcaaannangatacatcttaaactgatgccatttcgtttttcagtttcatgtagacacaaccttcttcaccacttttgtaacctcttccggggccttctctgccggtatgttcaccagattctccttcttcgcataatagtcaattaccggttgcgtctgcttgtggaatgcatctagccttgatctaagaacatccgcattgtcatctttacgttgaatcaatggctctccagtcagatcatcgactcctggaactttaggaggtgcgaatttagtatgatagcttcttccacttgaagggtgaatccaccttccagtaattctttcttcgagaaccgaatcatcgatcgcaaaattaagcaccttatctatctgagctccccttctattaagcatctcatcaagcttctctgcttgagtcacagtccgcgggaacccatcaagaatgaaacctttctgacatttgggtctgttcattgcttcatccatgataccaacaaccaagtcatcagaaacaagctctcccttatccattgcttcctttgccttcacaccnagaggagtcttagcagcaacagcagctcnnngcatgtcannagtagacaaatgacacaaacaaaactcatcctttatgaccggagactgtgtacctttccctgaaccaggtggaccgatgaaaacgagacgtttgtcaggtttagaggcacatttcatacggcgaagaagc

SEQ ID NO: 485 - DNA, 894 bp, Arabidopsis thaliana
  misc_feature (1)...(894): n = A,T,C or G
aaattatcacaaaaatacgttttcttgtataataatttttctctagatttgtcgcttaccttttgaaattctccggcgatgaatctcgccgggaaaaggaatattccggttattatttctgtttccgttactagtgactcttaccatcgccgtcatgtcttccgtgaacatcgtcgnnnctgaaaaatcattctcctagactttttttttttcnnnntctctttgnnattattattctttgcttcgtttttgnnaagaagatgatccgcngatttcagaagttttcttcttctggtttttagctgagaggttttggtagattctgtttnttcttcttcctctgtgnttttcgaatcnagttttggaatttttgaagattttgtttagtttctgttgaagagatctgagatatttgaacgaagcagagtgtatatgaaatcaaatctgtgaaaatttctttgaatttgaattgactttggacttgtgagagaagttagatcttcttcttcgtgagctatgccatttacgatgaagatccaaccgattgatatcgattcttcaccaaccgtagctagagctgaatcaggaaacaaaccggtgctcaaatctcgtctcaaacgtttgtttgatcggccgtttacaaacgtattgagaaactcaacaactacaaccaccgagaaaccattcgttgtcaccggtggtgaagttcaatgcggcggagtagtgacggagttcgagccgagttctgtttgcttagcgaagatggtacagaacttcattgaagaaaacaacgagaaacaagctaaatgtggacgtaatcgttgtaattgctttaacggcaacaacgatggttcttccgatgatgaatcagatctattcggtggttcaatcgac

SEQ ID NO: 486 - DNA, 894 bp, Arabidopsis thaliana
ggattcaaacttgagtttttcttcgaccagaatccttacttcaaaaacaccctattaacaaaggcgtatcatatgattgatgaagatgagcctctgcttgagaaggctattgggacagagattgattggtatcctggaaaatgcttaactcagaagattcttaagaagaagcctaagaaaggtgcaaagaatgccaagccaattaccaaaactgaagattgtgaaagcttcttcaacttcttcaatcctccccaagttcctgatgatgatgaagacattgacgaagaaagagccgaggaacttcagaatctgatggaacaagattatgacattggttctacaatccgggagaagatcatacctcatgctgtctcatggtttactggtgaggctattgagggagaggagtttgaaatagacaatgacgatgaagatgatatcgatgaggatgaagatgaggatgaagaagatgaagacgaagatgaggaagaagacgacgaagatgaggaggaagaagtaagcaagaccaaaaagaagccatcagtcttacacaagaaaggagggagacctcaggttaccgatgatcaacaaggagagaggcctcctgaatgcaaacaacagtaaacaaaatcgaaaagtctaaacgaaaaccagtaaaagaaaaacaaatgttttgggttttgagtgaagtttcatggcctagttttttgcttccatgtaaggcaaaatgttttgaagactgctcataggaatgttgctgtaggcaaaagagtgagtttctccatgtggagatacttgataaattatttttggtgcatttgtttttttttttttttaatcactaagttgaattttggtgtgttcgtcaaaattatatctttttaccacttgaca

SEQ ID NO: 487 - DNA, 894 bp, Arabidopsis thaliana
  misc_feature (1)...(894): n = A,T,C or G
gtacgacaagagtaaatgaagagatatatattctacatggtcttgcatcgttgttacatttcatcacccaaaacttgaagagaaaaaaagacagtgaataagcaatagaaaacgaaagtttaaactttcaattaagtagagcagcaacctcttttgccagctccagatgtgtcttcaacgttaatcgttgttccttgccccggaatggcagaattagcagccgctgcttcttgagcagccaaagcttttttgctgatgatgtggtaaatctctgctaacacggtttgaaatgctttctccacattggtggcttcaagagcagatgtctccaagaaagagagaccttctgtctcagctagagtctgtccatcttcctccgcaactgatctcaagtggtttagatcagctttgttcccagccatcatgatcacaatgttggaatccgcatggtctcttagttcacgtagccacctcagaacattgtcaaaggtttgtcttttagtgatgtcatagacaagaagtgcacctaccgctcctctgtaataagcacttgtgatagctctgtaccgctcttgacctgcagtgtcccatatctgggccttaacagtctttccttcaacctgaagagttctggtggcgaattcaacaccaatagtggacttagattccaaacaaaactcattccnngtgaatctagacaagatgtttgttttcccgacaccagaatcaccaatcaacacgatcttgaacaaataatcataatcctgttctaccctatgcgccatttttcctctttgatctcaccttttgttttttttcctggaaaaatggcggatgaatcgtgaaaacgaatttcaattgaccctcttcagatctgttgaaaggatgaaactt

SEQ ID NO: 488 - DNA, 894 bp, Arabidopsis thaliana
tgtaaccattccacatttcgaaatcaacttctacagatgtacgaggtaacaacttcaaatagaatctgaaagataacagacgacccaaagtatgtaaaaaaggttgtggggattgggtaaagaggaaagaagatgaccattgaaaacaaatagtgtatcgatgagcggcttttctatccacaagttcgcgatcctgtatgttactggccaatactccccaagagtcgttctacagcagcgttaacgttaccattggttgcaagcaaagcccttatgttctctgctctgtcgtagaatcccatttcttgcaactgttgcaactgagtcgcaaatcgctcttcaggaggaacattgggttggtttgtgccacttaggccgccagcaccaaggctgccaaacatattcatcaataaatctagtcctccgttattggctgtccctgtcgcagcaccagtttgcgtaggatcctggccagccgtgttcctattctgagagaaaagtgattgttgtagagacatcatttgctgcatcatctcgggagagctaaactggcgaaggaaatcagggttctgcatcatttccctcaactgaggattcatatctagcatgcttcggagttgtgggttaagactcataagctgattcatgtactgtggattggaaagtacgctttgcatcatctgcgacatagcggggttttgcagtatttggctcaattgagaagcatctggagtcgcaccaagaggtgagtccgctcccagcataccgagtccaccaaggcctccaagcccaccaagaccaccaagtccagcatttgtccttccaggggcagttgtctggccagccgtggcaccccaaggattaggaagtggatttgcattaggtgtacccgtt

SEQ ID NO: 489 - DNA, 893 bp, Arabidopsis thaliana
ttttttttttttttttttttttactcttaaagtttgcgcaaaatttcattccacaagttttgtgtattcatactcacatatgactacgagatttaacacattgacaaaattaaaagcacaaaaggagaaaattgtagtttcagaaagagtagtctttcaaatctgctctagagtcgtccatgtcaatctcagacatgcattcgtcagcactaataggagggagtttccgagtcttacgcttaaggttgtgtttgtgccaatcactcttacagtgctctctgtattgcttagcctctccaacgaacgtgttgcaagtgctgcacttggtccccttcttttcttctccaccttcttgctttatgttatctgtagtacttatctcttgcttctgcagtttcttgctaagttcaacgacgggatcggtcaaatccttagtctcagtctcagcaggtaacaacggcttgtgggtttgcaatgccatatcatcatgctcatcgtaatgatccatgcttgtgtcaccttctgcatgaactgatacagcgagtatttctagtcttccctggatactcctcacatgggaatcacactctcggaataggcccggttccatctcgcagacagtggacatctgtgttccagattcgtctttggagacaacactaccatcccattcttttagcttctccagaagcgaggggaaattttgaacaggaacagtaagacgcagtctcattggagaacgctttatagggaagtgcttttgcagctcacggatgacatcaagtgcctgcttcttggaattactatgaggatcaacagcaaaatgaatttcatgcattaggcgctctaccatgctgatggtataaggtcgttgtgtttcagggttgatagtt

SEQ ID NO: 490 - DNA, 893 bp, Arabidopsis thaliana
  misc_feature (1)...(893): n = A,T,C or G
cttttttttttttttttgagaaacaactttgttttttttactttgttctgatgtcttattatgatatttggctttggttatataccaaaataataaaatccaaccaccaataaattaccctaatcataaaaaaaaagttacagaataactttcttcttgaaggaagaaaaagatcaaagagaatcaagaatggtagtgttgtttaaatggagacaacaacagatgacaaaaggtcaacgtggcttatgtgtgttctcagtcttcttgtttgtcatagccaaaggcaagctcgaagatctttccatagtcatccacgaagtgaacattaagcccttctttcacattctctgccagctcatcaaagtctctccggtttgcctctggaaatattattgttttaatctgactccgcctcgccgctatagttttctctttcaccccaccaataggaagaattcttccggttagtgtgacttctccagtcattgcaaggtccttcctaacgggtttcttcgtggcaagtgatagtaangatgtgatcatggtnnngnctgcacttggaccatccttgggagtggctcctgcaggaacatggagatgaagcttggagtttgcaaagaactgattctctggttctttctctagcatgatctttctggcgactgtgtgagcaatttgtgcactttctttcatcacatcaccgagctgacccgttatattcaggccacctttaccttccccttcctccacaacagtcgtctctatgtacaatgttgaaccacccattgatgtccaagctagacccatcacaacacctaccggtgtctgctcatagagcttctctgcatggaataccggttttcctacataatccgcaaggtttgactcatcaa

SEQ ID NO: 491 - DNA, 893 bp, Arabidopsis thaliana
  misc_feature (1)...(893): n = A,T,C or G
tcaaattactaatgccttcggctggaaattttaatagtaataatgaaaatactaatattgatagatgagtttccgataatgccctcagactctgaagttctttcccatgaaagtctgaccaaacttccaattcgccggagcaatgttccacgacgtcgagcttctacggtcactgcttgtgactctaaaagaaagtgactgaccaaccaaaactgagttagattgccagttttgtccccagttacgactcatggtcatccacgaagtatgtgttcctttcacacctagccgcactatgtttccggcgccnnnnacgttagtgactagaaccaagttaaaataacggaaaccgttgattgtgaaccttattcctcctctcttccggcatggcactcggcggaaagagacggggacgattccggcacgatactcagcgatcttgagaaacataggcatagcaagatcaaagtgaggtctaggagggttacaccaaccaccattgtcactaggctgagcaaagttcggaggacagaaattagtcgcagtgatgaagattgaaggactaccagaatggcaccattttggatcactagcacatttgagctcaaaacaagcaccacagctaaaaccattgttgaacagagccgtgcttaaagccgccgtgttcacaccatagccttggctgtataagttaccataaccacaagctcctcccattgttccagaagcatcagagccaccgtagaaagtggcgtgagcagtttcccaaccaccaccattgtaaactcctgggattcttgcttcagacaatgcaagaattgtagtaagaacagataaaaccaagcccaacattgccattatctgagagagagactgagaaaatagagagagat

SEQ ID NO: 492 - DNA, 893 bp, Arabidopsis thaliana
ctctcttctcgttttcttcaacaaaaatcctcatttctctgagaatctggtgctttagctttggtaaaatgaagatatactctagaacggttgctgtttcactcattgtgtcattcctcctgtgtttctctgcctttgctgagcgcaatgacgggaccttcagagttggactgaaaaaactcaagttggattcgaaaaatcggcttgcagcacgcgtcgaatccaagcaagaaaagcccctgagagcttacagacttggagattctggagatgctgatgttgttgtgcttaagaattatctagatgctcagtactatggtgagatcgccattggtactccacctcagaagttcactgtggtttttgacactgggagctctaacctctgggtgccatcatcaaaatgctatttctcacttgcatgtctcttgcatcccaaatacaagtcgtctcgttcaagcacatatgagaagaatggaaaagctgccgcaattcattacggcactggagcaattgctggtttttttagtaatgatgctgtcacagttggcgatttagttgtcaaggatcaggagtttatcgaggcaaccaaggagcctggtataacatttgttgtagctaaatttgatggtatccttggtcttggattccaagagatctctgttggaaaagctgctcctgtttggtacaacatgctcaagcaaggccttatcaaggagccggttttttcattttggcttaaccgtaatgcagatgaagaagaaggtggtgaacttgtatttggaggtgttgatccaaatcatttcaagggcaaacatacatatgttcctgtgacacaaaagggctactggcagtttgacatgggtgatgttcttattggcggtgcacccact

SEQ ID NO: 493 - DNA, 893 bp, Arabidopsis thaliana
gccgcccttttttttttttttttttgaaatcaatctcttctttaatatatgtccgaaaaatattacatttgcaattttagagataaaatacacatgtacgtaggccaagttttacatctcgtaaatatacatcataaaaatggggctaattacccagaaaaataaagtagtaattacataatgaaaaaaaaaaatccttgtttgtaaataaacaaatataacaccataaactgaatttgatcatttttataataaaataaaataattcaaattaagtttgatttctttcatcgggctgatgaataagtgaaacttgtatttcttcgagtgataatcctttcgtttctggaacgagcaaccatataaaaagcaacgctgctccaccgatacccgcgaatatgaaaaacgttccttgagtgctccattcgaacagaaagttgaaagcgtaagtgacgattgaactacttgaaaatgagactaacgtaactatacttcctgcagttacttttatatttattggaaatatctccgacataattacccaaggtagacctcccaagcctattgcataagttgcaatatacatcattacgcatataaacgataatattggagttagttccgaaagcaattgcattttctgtaatgtgaaggcgaccccaagtagcatgcaagtcatgctcatcccaaacgctgaagtcatcaggagaggacgtctgccccatttatcgacaagaatgaggccaatcatggcttttggaatcacgaagatacctagcatcgtcgttccaatggccaccgaaaaaccagcttttctaaaaatggtacttgcataagagattacagcagcacttcctgagaattgttgtatcaacattagcccggacgcgtgg

SEQ ID NO: 494 - DNA, 892 bp, Arabidopsis thaliana
  misc_feature (1)...(892): n = A,T,C or G
acgcgtccgatgttcactcttctctgcttcattcctctttctacttccaggaaataaaaacttctaatcaaagagcaagagattaagaaatgtatgcagaaactagcttagctttccgattcatgcagagttcttcttctccagagattcaccaatttgaagacctctttaaatcctacaagctctctgatgaaatgaacaatcttgttgaggcaagtgagtatgattttggagaagagagtgacctattcaaagcccctgagccgattattgaagaaccaatgttagctgttgatcccctctctcaagagcttgttgaactcggtgatctcgggtcgttgcagagtgaccaacagcttatagacaaggctttctacgactgtgagcaggacctcctggtgaaatcagccatggagtctccgctctccgaggtactagacatcaagaacatctctttagtggcaaaaatggacaacgatgtgaagagtacgagtgtagtcgtctctgatgtcccaattccgaagagtgtgagctcgggaaacttgagctcaatggatatggtcgagcacnnnnatgcggtgattcnnngattccctgatttccctccagtggattatgggatgagaagagccttcagtgaaagcgatatacagacactggggactggaaatacgggtcttgttcagtctcagttggatcnnntaatcataagttgcacctctgaggaccgccgtgagaagctttctcgatacaggaacaagaagagcaagcgaaatttcgggcnnnaaatcaagtatgcttgtaggaaggcacttgcagacagtcaaccgaggatccgaggaaggtttgcaaaaacagaggagatgcagaaatgatgaggactagttaggtc

SEQ ID NO: 495 - DNA, 892 bp, Arabidopsis thaliana
aaacttcttattaatgatgatattacgacaccagaaccacaacaaacaagagattggtcacaagaccacaattctcattatgtgcttgatgcaaaaaggctaaaacagccttcgctttcttctctaagaaaaaaaaaagacttgtcttcaacaaaaggactaaagtgattgtttcttaaacaaagattcagaggagaagctttggtttagagaacaacgttgtcaaccaaggcttctgtaatcttcctctccagttctttttgctcgatccatagtgaactctgttcacgcagtagcttctctctctctttgatcttctcttccctcttttggcccatcatcttccacatctctagcttttctgctctttcttttatcagagtttgcctgaactcttcgtcagcaatcttacgttcctcagctctaaccttagcagcctcagccttcaagagtcgcctctcttcattagcagctcgttcagccaacaatctagcctcatccttacgctgtttctcaacacgaagcatctcaatctcatgaatgtactctttacgatacactcgaactttcttagcataatctctcctaagctgagcaagctttctctctgcatctttcggatcactcggagcttcccagctaccaatatagtattctggctcaagaaaattgtgagtctcctggtggaatctatggtgagtggcatcagcagagaaagacctgagagagccaatcatggaagcattctcactctgcctcctcacgaaacggcttagcttattgcaaaaagccatttcactaaatcttctgattctgggaggaacgaatgagtcgtcggagatttgtttgtttgagagagaacccaggtagaagaagaagaagaagcacaacg

SEQ ID NO: 496 - DNA, 891 bp, Arabidopsis thaliana
  misc_feature (1)...(891): n = A,T,C or G
gccagaaacttattacatcttatataagggaaacacactacattacattattgaaacaattttaagctgttgattcgaggaaagggtaatcggtgtaaccgacgactggatcagaagtgtaaaacgttggtctatcgtacttattcagcggtgcatccacttggaacctctttggcaggtccgggttggctagaaaccatcgaccataagccaccaaatcagttcttccctttgacacagcctcattcccatcttccctcgtgaaacctcctgcggagataaaagtccnnntaaacgctttcctcatcggcattagtgtgtgaggacaagcatgtacttctcccattgttttcattctcgcttcaatcacatgacagtagaggattccgtatttgttcaaagattccgccatataaagccctaatgctcctggattagtgtctccagattccatgtagtcagcaaatggagagagcctgattccaacacggtctggtccgatctccttagcaactgcatcgactatttctagaggaaatttgcaacggttttgcaatgatccaccgtattcatcagttctatcattcaccgtatccttcatgaactggtcaatcagatagccattagctccatgaatctcaactccatcaaaaccagcttccatagcatttcttgcagcaagcctaaaatcattgacaatgccggggatttcttcgataccaagccgtcttggaggggtaaagagagcttcatcgatgccattagagcgaatttgaggcatcaatggcttatccgaacaagagataggagcttttccatttggcnnnnnnntattagaaacgcggccaacatgccagatctgacagaagaagataccacctttggcatgta

SEQ ID NO: 497 - DNA, 890 bp, Arabidopsis thaliana
  misc_feature (1)...(890): n = A,T,C or G
atgcagtgatgccgatacaaacagtgtatagtagctcaggttgggatttgtattcgtgggcttttaaggcccaaagtgactatgcagatatagtgatacataatccaggtgttgaggaagatcctgcttgtggacctctcattgatggtgttgctatgcgagcccttttccctcctcgtcccaccaataagaacattctaaagaacggaggattcgaagaaggtccttgggttttaccaaacatatcatctggtgttttgattccaccaaactccatcgacgatcactctccgttacctggttggatggtcgagtctcttaaagctgtcaaatacatagattccgatcatttctccgttcctcaaggccgtcgcgccgtcgaactcgtcnccgggaaagaaagcgccgtcgcacaagttgtccgcactatccctggaaaaacctacgtcctatccttctctgtcggagatgctagcaacgcttgcgccggatcaatgatcgtcgaagctttcgccggaaaagacacgatcaaggtcccgtatgaatcgaaagggaaaggaggattcaagcgatcgtcattgagattcgtcgctgtctcgagtcggactagagttatgttctacagtacgttttacgcgatgagaaacgacgatttctcgagcttatgtggaccggtgatcgacgacgttaagcttctcagtgctcggaggccgtgagcttgcggcgacgagttgattcacgggacaatgaatgatgacagtcactgtngntttctcgcgtctagtgagaaattgggcttttaggcccagtggcccactgtttttgttgttgnnnnnnagcttaatgttatttgacaaagaaaaaagaaattactctggtcaatcatatcg

SEQ ID NO: 498 - DNA, 890 bp, Arabidopsis thaliana
tttttatctaaaacctgcctgataagagcattcactgtaaggaacaacacattgagtagcaaatggaacatctgaaaagtctacaaactgcaaagtaaaacgaacaagaagataacaaatattgctagggacttgactagatgaaaattcccaaaatatgtttttcgatttcagatgtgcaaaaaccctcttcacagcctttgtgaggatcacatcgttgaaatgttggaacacaaaaggcgtgtggaagacttgaattctagtttccaccttcattgataaacccttctttgcggccttcaaagccaggacgcaggagctttttctctctcttggcgattttgcgcatcttattctgttcaatcctatcggcaatattccctgatctcttttgctgcttctccaccttgaacttttgttgcccttcaattctctctttccacttctctgcgttcttctcttgcctctttttgtctttgtggatgctttgcttcaatagctttgggtcatcatgaaccttgataccagctgctctgcttgtagctgccttccatgagtgcttctttgcaattacatcacctttttctggatccttctttgcagcctctaacttcatagccctttcaagttctcttgcctttgaaagccttcgtttctttttctcttttccgtgttcttcatcgtcatcaatcttgacataaccaaatgtaaggtccttagcagcctcctccacatccaacttacccttacctttatctgctgacttaatctcctccacagtcttctcctcagaaactgtatccctctttctcttatttggcagattcttcttccttctttcattgcttcttggtctatctgaacctccacgaccacctttgagctcatca

SEQ ID NO: 499 - DNA, 889 bp, Arabidopsis thaliana
  misc_feature (1)...(889): n = A,T,C or G
taatggcgtcttcatcggattcatggatgagagcatacaacgaggctttaaaactctctgaggagattaatggaatgatatcagaaagaagttcatcggctgtcacagggcctgatgctcagcgtcgtgcttcagctatacgaaggaagatcaccattttcggtaacaaattagatagtctgcagtctcttcttgctgaaattcatggaaaacctatttcagagaaagagatgaatcggcgaaaggatatggtagggaatctgaggtcaaaagcaaaccagatggcgaatgctttgaacatgtcaaactttgccaatagagacagcttgctcgggccagatatcaagccggatgattccatgagcagagttactggnatggataaccaagnnnnnnttggatatcaacgacaagttatgagagaacaagacgaannacttgagcaattggagggaacagtcatgagcacaaaacacattgctctggctgttagtgaagagcttgacttgcagactaggcttattgatgacttagattaccatgtggatgttactgactctcgcttaaggagagtgcagaagagccttgctgtcatgaacaagaatatgagaagtggttgctcttgcatgtcaatgctcttgtcagtgctggggatcgtcggtcttgctgttgtaatatggatgttggttaagtatatgtaataccaacatcagacaacttataagttcctctgtaggtccactggcctctactctctatgtgaatggttgcaatgtatttcctcattccacatttgtggctgagcttttcatttctcttctgttaccaaaaccctttaagtaatatataatgtgtgcagttatcacaaaaaaaaaaaaaaaaaaaaaaa

SEQ ID NO: 500 - DNA, 889 bp, Arabidopsis thaliana
tttcttcaacaccttgtacgacccataccgtgaaggtgctgacttcgtccgtggataccctttcagtctccgtgagggtgtttccaccgctgtttcccacggtctgtggctcaacatccctgattacgatgcccctacccaacttgtgaagcctaaggaaaggaacacaaggtatgtggatgctgtcatgaccatcccaaagggaactcttttccctatgtgtggtatgaacttggcctttgaccgtgagctcattggtccggctatgtactttggtctcatgggtgatggtcagcctattggtcgctacgacgatatgtgggctggatggtgtatcaaggtgatctgtgaccatttgggattgggagtgaagacaggtttgccctacatttaccacagcaaagccagcaacccgtttgtgaacttgaagaaggagtacaagggaatcttctggcaggaggatatcattcctttcttccagagcgcaaagctcacgaaagaagctgtgacagttcaacaatgctacatggagctgtccaagttggtgaaggagaagctaagccccattgatccttactttgacaagcttgcagatgctatggtcacttggattgaagcttgggatgagcttaacccacccactaaagcttgagcagcaaaaaaaaccaccaccgcagttttggttattagctcaacatatcatctatcttctccgttttgtttttgttttgtcttttctcaaattttccggcgattcttcagttcgtttttaagttgccggagtttatttaaatagtgaatggtgtagttctatttatgaccgagacaatctctcttttgaggtttttcgtttttgtttcaataataaaaaatcatatcccttaaaaaa

SEQ ID NO: 501 - DNA, 888 bp, Arabidopsis thaliana
tttttttttttttttcttgtgaaaagttctccttcaaaaacaggattgataaattatccatataagacagaaatccagatagcagcagccaagattttatgtctctggtcagtggacgagaacagaaccaaccagttggagtgtaaaacttcaggagacagatacactagaaacctcagaaaaaaagtaatgaaatctagaaaacaagctcatggggcttcattccttgtttcaatgaaaaccttgctccgaggtaagtcttcaactctggaactgcttcaatagctttgatcaaagctgcgtccacggctttctggtcatctttctttccctgtggaatctctttcttctcctctttctcagcctcgaagaactctccttcagtcttcttctttttcttctcagcaaccttgccgaagtacttatcatcgaatttgtcgagggtaactccagaaatgtcaacctttgtggaagtaccaatgacataggcctggttaacacgtctcagaggaacaccattgatcttgaatggtccagtcacaagaagcaaaccggaggcaagctgcttaaggaagacaactctcttgcccttaaatctaccagcaaggatgataagcactgtccctggagtgatgctagctctgagcttggctggttttgccgtgcgcctgttggggagaggtttcttcacgtcttcagctggatagaacttcggtggcttctccaccggaacatcaaccttagatttagcgtcgtggcgggggaaaacgcctccatttttggccttgattgcccacaaacctctcttatggtacatctgagaccttgagtatttaccaactcccctgatcagatcaggattcctgttgaccttagctgtcctctgtt

SEQ ID NO: 502 - DNA, 888 bp, Arabidopsis thaliana
  misc_feature (1)...(888): n = A,T,C or G
aacttcaaagaagaaccagagattcaagttttaagcgacgacgatagtgatgaagaacaagttaaagacgtaggtgaagaagttagcgacgaagacgatgatgatggaagtgaaggagatgatgatgatgatgaggaagaagaagaagatgacgatgacgatgatgatgttcaggttttgcagtctttaggtggtcctcctgtacaatcagcggaagatgaagatgaagaaggtgatgaagatgggaacggtgatgacgatgatgatgatggagatgatgatgatgacgacgatgatgatgaggatgaggatgttgaagatgagggggatcttgggacagagtacttagtgnnnnnngttggtagagctgaagatgaggaggatgcaagtgattttgagccggaagagaatggtgtggaagaggatatagacgaaggagaagacgatgagaatgataactcgggtggtgctgggaagtcagagctccgccgaagaggaagagagctcctgaagaagatgaagaggatagtggtgatgaagatgatgacagacctccaaagaggtagtttttggatctgacaacaacacaatgagaccagagagctttttatgtttttttttctaaaaaaaatttggtgttgtgagatttgaatcattggttggggtttatgtaagtttattatggagcaactaagtagtagttttaagtttaagtaggggctcttttttttttatgcattgctatttctttttttttttctttgtagtgagtcaataaccaatgaaagtttctccaacaatttacctagctttctaagttattctgtatcttttcaattttagattatagttctaaactctaaaaaaaaaaaaaaaaagggcggccgc

SEQ ID NO: 503 - DNA, 888 bp, Arabidopsis thaliana
cttttttttttttttttttttttttactctaaaaatccagtatatatcaaatttatcatttatctttagtttcagcattttacaagggctccttgtatttcttatgttgggagccacaagttacaatacctttggtccaaaaaaaaattaaaggaaaaaagacacaaccaagaagcaaccctttggtggttctttacaaattcatactttcttgagtaataatttcataagaaaataaacctatctctctatattatataaataagaggaaacactccactttgttaaaatgctttccttatttgttggtttttttatgcgtccgtcaaagttgcggttggaccaaaatagtatgtttaaggtcaccaatgtgcagcttatgctcacccattgggattctcctctttccatactcatccactacaccaagatgcttgcaagcatcaacatcaacttgaacggtctgttttgcccctgccatgacatgaaccttctcgaacgctatcaattgtttgttcacacccaatccttttattccgtttatcggcggctcagcaaatacaaacaccgtgtgtgttccatcgaattcacctgtgtttgatacttcgacgtgaaggggcattttcggaaatgaattgcagttggtgtgagacactttgatggagtgtgatgaagagttgagaatggtattggcagagttgagattggagagtgaaactgatagttgggccaatgggcttttggccaaactatgagtgaaggtagtgtaacttaaaccgaacccaaatggaaatactactggacctttgtagaatctgtatgtccttcctggataattaccggatgctctcatggccattaccgtcattggcactttggccacgtaat

SEQ ID NO: 504 - DNA, 888 bp, Arabidopsis thaliana
tatttagacccattttgaagggataaaacgacaccattgttatggtttacacaattcactgaattacaaaaaccttccctcacacacaaatatccaatccttacatagtaatttgtagtttctgaaatcaataagaacattctctcaataacagagtccagttgatttagcagactctccaatatttacattgtaataaacctgcttcactccctcccctataccacaatgtcccccagaaatgcctgagtcgccagggctctggttgtatccagaaaccatagcggttacaggaaccattttctcagctactgctttgagacggtaacgctcagctcttgacccaatcacctgtcccaagatcgaagctccaatggtcaaagccatggctgttttgggcatcagaacagatttcctaagcattgctataaaaggcacagcagcatggacagccaaaaaccatgcaggcgaaaacttctttgtgtgttctctccatacacctagaggcacatttgcagccattcccatgagagcgattgcaagcatcttttcaggtaaaggctgagggcgaagacttttgaccaaagcagtcttcgaaagtgcagctctagcagctactataggagctggacatctatatttcataccaggtggtagcgttaatgctttagaaataagaggcatgactttgcttgcagctctaaaagacttggcgataggacaattcccggtttttaaccattcgtctccaactgcctcatgtttcgaagagtccccagactgttggtttttggaaggtttaggtttcttctgttgtttcttccatttctctgagaaaggaccaaaaccaaaagggcctccaggaccaaaagctgataggcttattgt

SEQ ID NO: 505 - DNA, 887 bp, Arabidopsis thaliana
tgatcatatttccctttacgcaaggatcgaagagacaaactctcttccagtaggatgggaagtgaatgttgatctcaaactctttgtccataatgggaagctacacaaatatttgactgttacagatggcttagtgaagcgatataacaatgcgaaaaaagaatggggtttcggacaattgatttctcgatcaacattctacaacgcgaacgaaggttaccttgaccaggacactggttcttttggtgctgagatctttattgttaaaccggctcaacaacaagagaaagttacattcatatcaaaccctccaaacaatgttttcacttggaagatacttcgtttctctaccttggaagataaattctattactccgatgattttctcgttgaagaccgatactggagactaggatttaacccgaaaggggatggaggaggaagaccacatgcacttccaatcttcctatttgctcaaggccataaggcaaacgcagttgctacaaacacttggggagcggttaatctgcggttaaagaatcaacgaagtactaaccatagacaaatatattctgcagcttggtacccgattggaagcggttatggtgtgggagtgaacaatatcatactgttagctgatttaaacgatgcatcaaaaggatatttggtgaatgatgccattatctttgaagctgaaatggttaaggtctctataaccaacatcgtctccgcttaaatatctgcacttctttgtctacgatcaatcaaccttatgaataaagagatatttgatgagtttgtaataagaaaacgttaatgtttgtgaattgtgaagttattacttctgttcttctgagttttttatttcaatgaaaataaaactctta

SEQ ID NO: 506 - DNA, 887 bp, Arabidopsis thaliana
  misc_feature (1)...(887): n = A,T,C or G
taacacacagaaagaaaaaaaacagttcctgttccattagattcttttctaaattgtctgaaaatcatggaagtaacttcccaatctaccctccctccagggttccgatttcatcctaccgannaagaactcatcgtttactatctccgaaaccagaccatgtctaaaccatgccctgtctccatcatcncnnnagttgatatctacaaattcgacccatggcaattacccgagaaaacagagtttggagaaaatgagtggtatttcttcagccctagagaaagaaaatatccaaacggagtcagaccaaaccgggcagctgtttccggttattggaaagcaaccggtacagacaaagccattcacagcggttcgagtaacgtaggtgtcaagaaagctctcgtcttctacaaaggtagacctcctaaaggaatcaaaactgactggatcatgcatgagtatcgtctccatgattcacgtaaagcatcaacgaaacgtagcggatctatgaggttagatgaatgggtactatgtaggatatacaagaagagaggagcaagtaagcttctgaatgagcaagagggtttcatggacgaagtactaatggaggatgagaccaaagttgttattaacgaagcagagagaagaaatgatgaagagataatgatgatgacgtcgatgaaacttccaaggacgtgttcgctggctcatttgttggaaatggattacatgggacccgtctctcacattgataatnntagtcagttcgatcatcttcatcaacctgattcggagtctagttggttcggggatctacagtttaaccaagacgagatcttaaaccatcatcgtcaagctatgtttaagttttagtgatggggtcagta

SEQ ID NO: 507 - DNA, 886 bp, Arabidopsis thaliana
  misc_feature (1)...(886): n = A,T,C or G
tttttttttttttttttttaaacagaattaggccttctttttttgaacttccgggaaattgaaagattgtttgnnnacaataagccaaaacctaatttttttttttttgtgtttggttaatttatctattgaatttttgttttctctctggataatattgtccagacgagcgccaaatccttccttcaagtgacacaaccatgacagagacatcatcatggtacttccttctatctccttgaggaatatccaacagatcatgaaactccattccgttcttggtggcagcacgagagagaagctctgcaatgaggtattgagcaggatcgccttcaggaacgttttcgatgaaccaagtcacgtgagcaacaacctcttcgttgctgaagtattcatacaatccatccgaggataaaaccatgaaacgatcgcttgaagtcagtctgtgatggacggtacacggttcgcatgtgatgtacgggtctgttccaatgtactctacttggaacatctcaagcaaagcttcattgaaatttggctttttgagaaatccagcaccgaaagctcgagtgacttttagttggcctttgactctatctttaagtatcgactggtcatcttccggatgttcagatctaatccgccaaatttcctcttccacacttgtgctatggtcacttgatagttgaactgctctcatctttaaccggtaagaggtcacatctctgtttttgtttgacacactgattggagttgcttgattgtgtattggagattcctctgatattctatccagttcaatacgcacaagtgattctcgagacctactcttatgcccgataccctcatcattcccaaaaccaggattagagtgacgatcatggag

SEQ ID NO: 508 - DNA, 886 bp, Arabidopsis thaliana
ttacacaacacagatagattacacactgagaaacagagaatggtagctgaggccttgcccaaatgccctgaagctccactcgtacttggactccaacccgcagctcttatcgataacgtcgctcctgttgattggtctttactcgatcaaattcccggtgatcgcggtggctccattgccgtgcaaaaggatgagttagagcacatgctaaaagagcttgatgcacatatcagtgtggctccattaaagaagatggctggaggaagtgtgaccaatacagttcgaggcttgagtgttgggttcggtgtagccactgggattattggtgcttatggagacgatgaacaaggccaattgtttgttagcaatatgggttttagtggtgtgagtatctcaaggctcaggaagaagaaaggttccactgctcagtgtgtttgcttggttgatgactctggtaatcgaacaatgcgaccatgtctctcgagtgctgtgaagattcaggcagatgaattaagcaaagaagatttcacaggctctaagtggttggttcttagatatgctgttcttaatttacaagtaattcaagcagccattcgatttgccaagcaagaaggtctttctgtttccttggatttagctagttttgagatggtcaggaattctaaatcagagcttcgacagcttctggagtctggtaacatagatctttgctttgctaacgaggacgaagcagcagagctccttaggggtgagcaagaagcgggtccggaggcagctcttgagttcctaggcagacattgcagatgggctgtggtaactttagggtcgaaagggtgcattgcaaaacatgataaagaggtggtacctgcccgggcggccgctcgag

SEQ ID NO: 509 - DNA, 885 bp, Arabidopsis thaliana
tcgaaaagctgtgtacaacaattcaaatactgtatttcaagtgtaatgtaaaacattttatcaacaagaagccattagtcttccatcatcattttataataacatgttactttcactacacgttaaaattcaaaacctaacaaagtttttgtggcacaaactcaaaaaccaataaaacaatgattccaaggttaattcccagatggtcttccttgtgcaccattagaatcttgaggattattgttaccagtgcctcccattgatcctccaaacatctgcatcattgatcgtaatgcacccgataaatcttccggcatttgctctgtgcctccgagatctatgttgatatttccgcctacatgtatctcaggctcatctgcaccatttctggtaccatctccacctgctcctccctcgttattgcgagaatgatttcccgggaatgtgtttcccgccatgttcatgaacatgctcatcaaatcagggtttacaggcattgagaactgagatggtattccctggcctcctcccatttctggctcttgagtgtaaaacgtgctcgtgttctgctggctacgtctctgtcgttgttgttcttctctaattttctgttcagccaccctgatattttctttcacagattcgttatgcggatccaacagcaaagctttcttgaaacctttctcgatagcctcggcatattttccttgagcataatatgctaacccaagacgactatacgccttactataatttggatcaatctcaatggatttaagacagtccttgattgcttctgagcacatgttgatctgtgtatatgcagcagccctgttgcagtagaaaacagcgttcttatccgtcagtgcaattgcaaaagaataa

SEQ ID NO: 510 - DNA, 885 bp, Arabidopsis thaliana
ccacgcgtccgccaacatctttcttacactcaacaagagatcatatcatgtcctctccaagagaaagaggaaagagtttgatggaatcatcaggatcagagccaccggtgacaccaagccgttacgagtcgcagaagagacgtgactggaacactttcggacagtacttgaagaatcagagaccgcctgtgccgatgtctcactgcagctgtaaccacgtgcttgatttcctcaggtacttagaccagttcggtaagacaaaggtgcacgtgcctggctgtatgttctacggccagcctgagccaccagctccttgcacgtgccctctcagacaagcttggggaagtcttgacgctttgatcggacggctgagagcggcttacgaggagaacggtggacctccggagactaaccctttcgctagcggagcgataagggtttatctgagggaggttagggagtgtcaggctaaggctagagggattccttacaagaagaagaagaagaagaagccaacgccggagatgggaggtgggagagaggactcttcttcctcctcctcttccttcagcttctcttaagagattctccatcgtcgtgaaagactttgtgaacttggcaggatcagtaagtctcaaagagggatcaaatgtaaaagagacctcaaatctatctactggtatcttcaacatatctttcgggaccatttttgcagctcttcgtcccctcctcttcatttccgcagatctccgtcgtcataaatatcttcatctattctcttattaagctctattcatatttattctcttattaagcacttttcttttgaataaagtaagtgtaaagagtttatatattgaattcaggtgtgttttgtaaaaaaaa

SEQ ID NO: 511 - DNA, 885 bp, Arabidopsis thaliana
  misc_feature (1)...(885): n = A,T,C or G
ttttttttttttttttttttttttttttttttttaccagaagtcgtcgccattatcattcagacaatattcagccaaaatcagttttaaatggaattttacaaagaacccaaaaaacgaaatgacaaacgttttagaaccaaaaaagagagccggacttgttttgatgttcatcagctacttattgcaatatgcagagagaaagacctcatatgatagataaacacatgaaagtgaatcacgaaaaagatgaagcttctaaacggcgatcccaagggacttcttgaacttctctacctctaagtagacagttgagtaaggtaggaactcagagaagtaatctccgcttaagtggttgatggctacagcgagttttgggatctctagggtttcttcgttggttagggttctaatgaatcttgctggattgcctccccatagttcacctgatgggatcnnncttcctggcggcacaactgannccgcttccaagattgaccgggtctcaaccagtgagccttccattagtattgagtgttgaccgatgatgcactctggttcgatggtacatgatctcagaagactgtaggcacctactgtcacatacctgtcgattattgtcgctgctggtaatcctgttggggaagaccaggcggcatgaacaacacaccgttcctgtacattcgagcagaatccaacagtgattttgttgagatcgccgcgcaaaacggcaccgttccaaacagacgagccgtcccagactgtgacctgaccagccagcacaacgttgggtgccacgtaagcatcaacggctaccttcggaagccactgtcccaaaggaatgatctgtcgttggcctctgtagtcccatttcacacgatccgtc

SEQ ID NO: 512 - DNA, 885 bp, Arabidopsis thaliana
  misc_feature (1)...(885): n = A,T,C or G
tatcgagaagcttctctcgaatatgttttctgacgccggcggaggcgcaaatcgtcggcgtcgggacttagctcttccgatcaatttgctttggttacttcttatgcttttgtttacaacttctgtccgctactcgaaaactctgtttcaaccctctcgaatcatttctccttcaccggttttcaacggcggccaaaaaaccagctacggaggaagacgatgtggtccggcgtttgccctcctgttccaccctcttctcgcaaattcttcgccaaaatctttcttttccagcgatgcaatccctcaatcagaagcttttatcatctctccgccttttatttacagatctagatctgtttcaaccaccccaagagaatactcacaccggaattcgttgatggcaagagatgtctcttggaccgtcagatgcgccatctccggtggagtcgtcgtcggcgcacgacgttttcttcttatgggtgatggttccatggctctccgacaagcttccaaagcagctgcacgcttcaccgacgagggagacaacaaaagccaaaaccctaattgcaaatgtgggctcctctttgaagatgggcctctcttttcatngcccaataagatatctacttcggcccaattctgattttttgggtcaaacctaattaacttttggcccaggtccgttttctttattcgtttggcaaaccctattttatttaagtcttctaactttgctgagaagaatggtcgtggactccattcttgcattgttatgacattgatagatagggttgttcaaattcatctaataatcctggtggaagatatctttaatgttgtcaattgtggtaatccatctaagaaacctgtgatacaaaaaaaaaa

SEQ ID NO: 513 - DNA, 885 bp, Arabidopsis thaliana
ttttttttttttaatataaccaacactttattacagaacaacaaatccaatgttgcaaaacatgaaaccacataatagcagaatctaaggcctttcctaagaaaccctaaaagcaaataaaaccataataagagcagaaaacagagagccaaaccaccaacatcacgagacttgaaaataaaaaaacaaaagagaacacaacagtttcttcaccaattcatatcctatcaaccttatcagccttcaccacaggattagctttagcaatagcttctctcgcaactcctttgaaatcgaattggcactcgtgactctctggatatctatgagttccacagaaagtgcttccacacctacacttgaaacccgtcacgccaactttcttgttacagctcaagcatctcgtagccgtcgatttcggtggatccaacggagcagcagccgaatcaccccctctcgttgatgaggaagacgatccagatccgaggacgccttgagtgatttcttggctctgttgtggttgagttttgggtttattagggtttagagatttctcgacggcggctttagcggaagcggtttgttcctccgtggctcggatgtctctgtagcatttagagcagaggttcatgttcgatggagatccgaagaagccacatcctttgacgcagagctttggctctgaaggagagaagcttgtgctgtcgttttgctcagaacccataatggaaagatctcccaattccaaagtcgaaatcttactaattcccacccaaaactctgctttagtatgtcggcgacaattctctcgtaaagaaaatctctgacggtatgtatcactgaaaatttccgatagaaacttcgtgatttgatcggagatggaga

SEQ ID NO: 514 - DNA, 885 bp, Arabidopsis thaliana
cttttttttttttttttttttttttttttgttacactcactggtctgtgattttctaagagtcaaataggcaaatgaatgaaacacagaaaaaaataaatgatcgaagcttcaagtttcaaacatacatggaaagctttgaaaaaatattgaagtcacaaatgaaacaccaaggtaatccaaaagatatgttcgaggaaatctgacatgagagataaaagactatacaatgtcagccaaaccggaattagagacaacacagctaacgaccaccaaaccaacctcttggcggttgctgctgctgctgctgcatcatagctcctctatctccattcatcagcttatctaaaacaacattgaggtcaacagcttgaccgttctctgtcaatgttctcactgttcctctcacttggtcccttgggaaccccatgctaaccactttgtcaatgacatcatcgactggggctctgtttcctgatcttggggaatctgagccaccaccacttccaccgctgctgatggctgatgccattggtaaaccttgtggtagtgggcgtgccattgggagctgtgggtaggcaccagatccacttccactctgatgtgtgggtttcacagatggggtgtttccatactgtgaaggtggcccggtatacgggtatgattcaggagaatatccggaaggaaaacctgaattggatctgccgcctggtccatcatacattgatggtggcgttggaggagcgttgtagtactgttgagatggggcagaacctggaggtggatgagaaggtggttgacgaggagggtttggcgggtaagattgctgagggtaaggtggttcctccgggttgtagcctgacgggtgttggagctgaggaggcgg

SEQ ID NO: 515 - DNA, 884 bp, Arabidopsis thaliana
aacaagaatacaaatacttgttactagttcttcaacttttgtcattttcagactacaaacaacagatttttgattccttgggtaaacaagttatgaaaaaggagaaaacaaatacttatagctctaattctcctgttgattcctttcttcttgttgaatcagagtatagaacaacctttctgagattttctcttcttcttcttcttgttttttggtggctggagaacgaccttgatagccgcatcaaacactgctttcacattctgttgagtttttgcactgcattcgatataagcaggcgccccaatcagcttctttagttcttcaccctgagcggtagagataggcacagcaccagggtgctcggcaaagaattgcttatcatctcgaagatcaagctttgttccaacgaggatgatgggaacaccaggagcataatgtctcagttcaggaacccactttttagaaacattttcatagctagctttgctgacaagtgagaatgcaagtaagaagacatctgcaccgcgatagctcaaaggtcttagtctattgtagtcctcttgccctgcagtatcccacaatcccaagttgatagtgttgccatcaacaatcacattggcactgaaattatcgaacacagttggcacataatccgtggggaaagtgttgctagtgtaggagatgagaagacaagtctttccaacagcaccgtcgccgacagtgacacacttgataaaccttgaagcactcatctttctctccttcttcaaacttcaaaaaccctaatttgttcacgaattggggatttttgactaaagagagagagagtgaggttctttaaagagaaagaagacaaagaaatagctgctgaaagtctctcc

SEQ ID NO: 516 - DNA, 884 bp, Arabidopsis thaliana
  misc_feature (1)...(884): n = A,T,C or G
aatcgctcgagaccccttacaaatattgatctctctctttctatatacataacaagactcattttgtgaggccatgtcaggagtttgggtgttcaataacggagtgatacgtctagtggagaacccgaaccagtccggtggagtttccacacagtcgcacggccggagaaatgtcttggtttacttgccgaccggtgaagccgtctcatcttactcgtcgctcgaacaaatcctaaggagcctcgggtgggaaagatacttcaatggagactccgatctcatccagtaccacaaacgctcctccatcgacctcatctccttaccaagagacttctccaaattcaactccgtttacatgtacgacatcgttgtcaagaaccctaattccttccacgtccgcgatttcaattgaaatccacacggaattaattactctcgaccangnggtctagtttgtgtttcttttgttcaaccgggaaattccagacataaaacctataatgtcaaaatcggaatctgcagtgtgaatatgaatcacgtagaggtagaagagaagatgtgtgcagctgtttgaattcgagaaacgaagcgatgactattggattatcatcacttagttagattgtgtttatttgttgatatgtgtgntttaaattnntaactgtttgtttggttttaactggttctccaagtttgtagcatgtgcatgcttctttatttttcattttaatttgtgaggcttgtatgggacaagatagtagtgttgcaaaaggtggcacattacttaaaaatgttgttaatttttttgtttgtttgtagctttgtaagtgtggtgcatggtgatcgatgtaagaattgtgtttcttttggctttaaactatttt

SEQ ID NO: 517 - DNA, 883 bp, Arabidopsis thaliana
ccacgcgtccgctgctttagggaagatggctaaagtctcgaaagactatgaacctgtgattcagacttaccagaaagctcttacggagcatcgtaaccctgaaacattgaagagactgaatgaggcagagagagcaaagaaagagttggagcagcaagagtactatgatcctaatatcggtgatgaggagcgtgagaaaggtaatgacttttttaaggagcaaaagtatcctgatgctgtgagacattacactgaagcgatcaagaggaatccaaaagacccgagagcatatagcaaccgggctgcatgttacactaaactgggggcaatgcccgaaggattaaaagatgcagagaaatgtatcgagctcgatccaacattcttaaagggatacagtagaaaaggtgcagtccagttcttcatgaaggagtatgacaatgcaatggaaacgtaccagaagggtctcgaacatgatcctaataaccaggaacttcttgatggtgttaaaagatgtgtacaacagataaacaaggcaaaccgtggcgaccttactcctgaggaattgaaagaaagacaggctaagggaatgcaagacccagaaattcagaacattctcacagatcctgtaatgagacaggtactgtctgatctccaggagaatccagcagcagcacaaaagcacatgcagaacccaatgatcatgaacaaaatccaaaagcttatcagctcaggaatcgtccagatgaaataaacgaagccaagacattgatttcgattttgctgagtcattactcttttataactccaaacactaagatcgaattcttctcatttttcagacttttctgatatatcaatttttctttcaaaaaaaaaaaaaaaa

SEQ ID NO: 518 - DNA, 882 bp, Arabidopsis thaliana
  misc_feature (1)...(882): n = A,T,C or G
acaagcttttccaaatttcagaaagacaaacatcatacgattatctagtttagcattgccttaagatagtaaatccagaaaacaactgaatcaagacagacatttcaacaaaggactcgaacgaagactatcaaacattcatcattattctggtttggtgtcttcttcttcttcaatcttaggcgccagatagtatcgaatgtaacccatctcagccaccttgtactccaccacgaccggtaactcagaggacaaactgatggtcacagtttccgacaatggagtagcctttgtgaaggagttcatgtacctcaatgcaaatgaaannnaaacaggctcgttcatctctatcacaatagcatcttcaggtttgtcgacggtagtattctgcctgagcacaatgtttgctgtcccgatatcacctgctgttgaaaacttcaccccttcttttgttaccgagatcacaactgtgtcaccaatgctactgagatctttgcatatcctggaaaattcaccagaaggcattctcacaatcgagtggtactcagcatcaggaattcctaaatgctcactgtcgatatccatcagcttcatctcaaaatctgcaatcttgtcttgtgtgggactctcaaacatgaaagtaacagtgtcgctaccatcatcagctttgatggtgatgatatcatcatttccagcacatttcagcatcttagacatattaccaagattcattcccatagagaggttcctatcgcatctatagtgctcgaaaccttcagatctaagcaaaagagacaccaacgcgacatggctcgaatccatagcttgaagcgagaaccctgtggtcgaacagtcgaagttcgcatcgttcaccagatcttt

SEQ ID NO: 519 - DNA, 882 bp, Arabidopsis thaliana
ttgtgtttcaaaaattgcaaagccttgggaatagaaaaacaatccacatctaatatacaaagacaagactggaggaccaaacaagaccagaccagcagaagaaggagagacggaaggcgaaaaataaagacactcttgtttcacacgaaaaattgtcaccatcatcatcaactagacaatacaggaagactaagaagaatcaagaagagagaatatatgttcttggtgaagattagttcttcgactttgaatgctttacgagccaatcaatgacttgatcaatgttggtagagttcttgcatgatatcatgaaacagcagacttctctatctgtaagtgatgtaagtcccatttcgtctgttaaggcttctttggacagagctccaggtttgtcaatcttgttcccaagaacgagaagagggataccattaagcgaagtcttgctcaacaaatcatggagttcacttttcgacacacttaggttgtcaggatctgcagcatcaactacatacacaatggcagaaacagcgcgacagtaacgttcccacatgctgcggaatcttggttgaccaccaagatcccatagtttgattgtaacatttccttttgttactttcctcatgttaaacccgaccgtaggaatcatgtcttcactgtatccaccagttgcaacaacatttacaagtgatgtctttcctgcattttgaagtcctatcaaagaaagctccatttcttgcttgaagaagaggctacgaagccaattgagaaaagcttccaacaaacccattgatgatgatgattcacaaaagctccgacaaacagatccgcctgagagaattctcctccacggatctctctgagaagcttcttgtcctcgttgat

SEQ ID NO: 520 - DNA, 882 bp, Arabidopsis thaliana
gtgacgattttattaagatgaacataacatacaacgaacgagcaaaagcccaacaacataaaacggtttacagagactattttaagtccaactggcccaacattacatttagagaagaagattggatcaagctaatatatctcagacacgtgttagcatcgaatacacatgtaacctgaggagacgaaagttttccatctatcatccttcgccgtgaagccatcgattctgccggaaactgaaactaagtcgaatgaaactcgaagattagcttcatctgaatttttccaacaactacaaaacagaagtaaggatctaatacggatctattaatctcaaaagagaaaaaagatcttcgattaaccacctctgttacttagacccaatcgaagcttgaatataagagatacagctaaaggcaatcataataagctgaggaaagagctttgaatcttcatctcaaaaacgcaaactgcctaattattatccgtaaaccttaaactcaaaggataggttggaattagatctaattaagcaagcttggactgaaaaccaacgccatcaccaacacacatacccaatgaattcttatctaaagacaatcaacggtcgaaacgtaaccgtgatataaaccaaaaggaaaagaaaaccgaactacgccggattaacaccgtgagctagccatcaccgctgaaagagccgatgatgctagacaagggccgaccatgtactgctgtggaagccaatatatgtcagacgaaagccggatactacaccggacggcaattcaaccatcaccgacgacatcaatttaccgtcgtcgaaaattttggtttgatgtcaatctctctctctgaaaattttgagagagagaagagagag

SEQ ID NO: 521 - DNA, 882 bp, Arabidopsis thaliana
cacgcgtccgatcacaaattccttcttctctctctctcttttcgtccctaagaatcaattatgaaaggagctaaatcaaagactgaaaccaggagctccaagctctctgtgaccaagaagccggctaaaggagcagggcgtggcaaagctgctgctaaggaccccaacaaaccaaagaggccagccagtgctttcttcgttttcatgtaatcctcgcctcaaattctttggttcagtagtttccatggatacaacttttattgccgtacaaaagttttttcatctggttactgccaatcatttttttaagggaagatttccgtgagactttcaagaaggaaaaccccaagaacaagtctgtagctactgttggaaaagctgctggagacaagtggaagtccttgtctgattctgagaaagctccttatgttgctaaggctgagaaacgcaaggttgaatatgagaagaacattaaagcttacaacaagaaactggaggaaggtccaaaagaagatgaggaatctgacaagtcagtgtcagaggtcaatgacgaggatgatgctgaggatggtagtgaagaggaggaggacgatgactaagaagctgaatgttggtagcattagtatagatggctgcaaaaatctctctgtttttatctttacttgaaatgttaacggggctgattaaaatgggtctttctttttatctttttatatttccacaatctctcactaaagccctctgaatggagaaagtgaattgtagaatgtttagatggtgaaagagagacttgcagctctgtactctttgctttataaaacgatttagttttcttttctcagtttattatattgttgaattgatgatgatgttagctaaatt

SEQ ID NO: 522 - DNA, 881 bp, Arabidopsis thaliana
tatgcgattgcacttggcatacgtatatttatttaacgaacaagacaacacactggtatacgaagttgttattatacagtgaaatgttgattaagaaacataaacaaaaatcaagctcactctgtatccttcttctttcatatgaatcaattgatgatatccgtatcaaatcatagaaaatgtaagatacggtccattatatatggatcatcatcaatcgaaaatataaatataaagtattaaacacatgtggaattaatgaacattttacatagaagccggagctagagcaggagatgagacttcttcggaggtggggcctggtgcaatttcggagacagggcctggtgcggcgccggagctgatgaattccatcatcgaacgctggggattcatccgttgagcatcacatagatcaggtaaaaatgcaccttcaccggcggcgaggttgaaatagagatcaagaatgttagggcaatagtccaagcaagcggatgagcaaagcttagcggcgaaacctgcctccatcaaggagtctgacgagatccctacggttttccgatcaaccccacaagcggaaacgcactcgtcggtctccacgtggtttacaatcccttccacgtccactgcggaagtgcggcaagtgaattctccggcgacattagccgtctccaatatacatcttttcccggaagcggatattgagaacgagcacatatttgttggcagattctcgcaaacaatgttttcccctatagccgcatggagaagacttgagagaatgagaaagattggcaatttgagggaagaaaaagacattgtttctgcgtttttcttttctctcttctcctctgtctccttttcttgatttgtacggacgc

SEQ ID NO: 523 - DNA, 881 bp, Arabidopsis thaliana
  misc_feature (1)...(881): n = A,T,C or G
aattcttcatatatatgcgaccaagaacccgatttggtggaagcgtatgtgaatttcgcatcagcacttatccgtagttgtcataaggagttgttgggtacttctggaacacttcttgaaatttctttccacaaagcggctatatgttgtacagctatgcacagaggcgctgctttagctgcaatgtcatacttatcaggtttcttggaggtttcactttcttccatgatcgaaaccgtgaatagcatatcagatggatcattcagcgtggtctctgtccaggtcgtatctcactgtggagagggacttttgtctaatctggtctatgctctacttggagttgcagctatgtcaagggtccataagtgttcaacgatactgcagtttatgtgagaggacttcatggaaaggaatgttgtgttggaaatctctccaaggatggctaaactcagcggtttgggcacttccgagcgagtatctaaagcaaggagaagcagaaagcatagtgagggaatggtcagaagctctaggaggtgcagggatcgattatcttgagaacaaaagctgcaattttggaagcaataacagttcaggaggacatatgcaagggaaacacggtcgaacattgaagcgattagtgagagattttgcggattctcatcgaaacgatccaaatccaaacatcatatgaataaatcaatcgataaactttttttttttgtaatgtttattttattttgttgccttaataatgagggcaatgatccatcatcttcttcatnnctgtcgatgctctgtttctaatgtacagtaggagaggaaaagaaacctcatgaagaatcttgagccatttcttttagattcatctgatgagaaggata

SEQ ID NO: 524 - DNA, 881 bp, Arabidopsis thaliana
cgtccgagagaagcaagtttacaacggaaaggccgcaaaactgatggaagcatacaaaaaggaagtggaagcttacaacaagaagtctgcggctactaccagtagctagataaatctctcttagtattgaaatcatgttcaagtcctgttgaacattccttattatgcatcgttagattactctaagtacttttatgttttaactctcgctgatcattacttactagttactatctatttctctgttacaaattttaattaataataaatcgactcgtgtaaaaacgcggggaaagttgtgtcaatctcgaccgttggattgaaccagtcaacaacgtcgaagatcggagaactctccacgtggccgaactcgccgttgatagttccgtaattgtaaaacggcggcgtatcagggaacgagaaaacgtctttaccatcatcaagcccatcggttcgaacggttaagttggatttaagactctcgagaatatcctttggcttttgggtaatggctggtttgactctggtgtcttgtcgcttctccggcgaggctaatggtggtgttcttgtgatcgcctgcgaacaagtgtgtgttcctctgtacgtcacttcgaaaaccgtagcatccccgtctgatctctggacttgtttcgttgcccaacagttttgtgtgctacgatgtgtgcatctgtaataactccttgggaatttggcgcctaaaatgtctttttgaccatattttctccagctaaagacatcatcttgaggtccttctaagcctctctctgggcttattctcactttttctgaccactttggtaacatctttctgcaaaaattacccaaatttcaaattagtttctagaaaaaaaaaaaaaaaa

SEQ ID NO: 525 - DNA, 881 bp, Arabidopsis thaliana
accgatagatccaagcgaattgatctagaggaattgatccaacatgggtaacacagataagctgatgaatcagatattcgatttgaaatttacgtcaaagtctctgcaaaggcaatcaaggaagtgtgagaaggaagagaaagcagagaaattgaaggtgaagaaggctatcgagaagggtaatatggatggtgctcggatctacgctgagaacgccattcgtaagcgtagcgagcagatgaactatctccgtctcgcttctcgccttgacgctgttgttgctcgtcttgatactcaggctaagatgaccaccatcaccaaatccatgaccaatatcgtcaaatcccttgagtcttctcttgccacagggaatctacagaagatgtcagagacaatggattcattcgagaagcagtttgtgaacatggaggtccaagctgagttcatggagaatgctatggctggttcaacttcattgtccactccagaaggcgaagtcaacagccttatgcagcaggtggcagatgactatggtttggaagtctctgtggggcttcctcagcctgctggtcatgccattcctactaagactgaggagaaagtcgatgaggatgatttgtcgaggaggcttgcggagcttaaagccagaggataaatgcgctaaccaacattcatgcttggattacctgccactttgcatgcgatccttatcgaattgttgcttctattatccgcaaacacgggcgtatttgtgtatattgctcactttgaaatatgctttgtttataactttatataaaaaaccttcgtgtgtttttagtttttaccatttgaatgatatgctttccttttgagttgttcaaaaaaaaaaaaaaaaaaaa

SEQ ID NO: 526 - DNA, 881 bp, Arabidopsis thaliana
atgttggtaagaggccaatcactggcatgcggctctacctagagggtagaagaagcaaccgtttggcaattcatttgcaacacctttcctctcttcccaagatatatcagctcgaagacgatctaaatagaagtatccggcaagagtctcatgaccgtcgatactatgagaaagtaaactggaagaactactctcacgtctgcacagagcctgtcgaatcagatgatgatctttctgtagtaacaggtgcgcagcttcatgtagagagccacggattcaagaacgtgctcttcttgcgcctttgtttctctagagttgtgggagcaacactggtaaagaattctgaatgggatgaagcggtaggctttgctccaaaatcaggactcatctcaacgctaataagccatcacttcactgcagcacaaaaaccaccaccacgacctgcagacgtgaatataaattcggctatatatcctggtggaccaccagtacccacgcaagctccaaaacttttgaaatttgtggatacaagtgagatgacaagagggccgcaagaatcacccgggtattgggttgtatcgggtgcaagattattggtggagaaaggcaaaatctcattgaaggtgaagtattctctatttactccaatattgggagatgaagtgatcgaggaagcctatgaaggttaagagaaaatggtggtggtgtggctcagagacaatgagagaaaataggatgagtggtatgtttatgtctgtacgtgtacattcttaaggttttgtcgtttgtaatgttaatggtgtggatgtctaatatgccactgtaaaacttatatacacgagaagttgggatcgtggatatcaaatttatgggtttgaata

SEQ ID NO: 527 - DNA, 881 bp, Arabidopsis thaliana
ccacgcgtccgcgcctctggtgttatccccaatgtcgtcactccacgctaccgtgagcctcccactgttctccaactcaaaccacaaaaagctaacgtgcgcagctacattatcacctccgccatggaaacagagccggcgagttatctccgtctccttttttctctcccgtctcctcctcctccctaacgatgctatggctggtggcttaatggataaattggataaatacgtcaagagttattgaataggaagaaacttgatccacttgaagcatatgtaccaccagtgattctagctcagttacaaatccaggatcttgagggatttttgaatgtggagaaacctgaatttgaggcgtgtagacgccaattgcggtctggtcctgctagctctcttcgtgtaaacattcgagctgttgctcagtatgcttcagatgatggtttctccaaaaccgccactgatgatgttgatcgatgtttaagagcattggaagaactggattcgttgtttctacgtgcgtcgaggaaagattcaaatgcaactgttgtattgatgaagtcacagcttggaacagcgttaaccgcactggacagtcttctacaaacagttccttctcaagtgcttgataaagggaaagctatggtggaagtctacagatcagcatctgaagaagatgcgggaagtgatgatttagaatcctctgagataaagcagctccagtccatactgtgagaggggaggtcacaggactattactatccaaaaacagttgttaatcttacagcattggtatcaaaaactcttctgattcagtgtatatcatgtattgttaacttcaattgatgcatatattaaaaccagaatagtttgctgctaaa

SEQ ID NO: 528 - DNA, 881 bp, Arabidopsis thaliana
  misc_feature (1)...(881): n = A,T,C or G
ccacgcgtccggagcagttgagagagagagagagatagatggcggcgaagacgatgaggaaggcggaggagctggtggagaaggcgatgaaaggaaacgatgcttctcatgacgcctggcacgtgtggagggtccgagaccttgctctctccattgctcgcgaggaaggtctctcttccaattctgactccatggaaattgtggagcttgcagctcttctccatgatataggtgattacaagtacataagagacccttcggaagagaaacttgttgagaatttcctagatgatgagggtatagaagagaccaagaagacgaagatactaacgatcatcaatggaatgggttttaaagacgaattagcaggagtagcactctgtgagtctcttccagaatttggggtagttcaagatgctgatcgccttgatgcaattggcgccataggaattgctcgttgctttacatttggtggaagcaggaacagagtgcttcatgatcctgagatcaagccccggacagagctaaccaaagagcagtacattaagagagaggagcaaactactattaatcactttcatgagaaactcctcaagctaaagaagctgatgaaaactgaggcgggtaaaaggagggcagagaaaaggcacaagttcatggaagagtatcttaaggagttctatgaagagtgggatgggtcaacttgaaaagttaaaaatgataaatgaagcanaaaagcagaggatttgttcaaccggattttattgagtaagcagtacctaccaaaccaatatgtggtttaggttttaaacagagtggcaactctctctctctttttattttttgtttaaggcaactctatttaaatagctcgtaataac

SEQ ID NO: 529 - DNA, 881 bp, Arabidopsis thaliana
ccacgcgtccgctctggctctgtatcgctcgctgctcttcctcccacagatcgaaaaccatgaatcctgagtacgactatcttttcaagctcctgcttatcggggattctggcgtaggcaagtcttgtcttcttttgagattctctgatgattcttatgtagaaagttacattagcactattggagtcgattttaaaattaggactgtggaacaagatggcaaaacaattaagctccaaatttgggacactgctggtcaagaacggttcaggactattactagcagttactaccgtggggcacatggaattattattgtctacgatgtcacagatgaagaaagcttcaataatgtcaagcaatggttgagtgaaattgatcgttatgctagtgacaatgtcaacaaactccttgttggaaacaagtctgatcttactgaaaacagagccattccttatgaaactgccaaggcttttgccgatgaaatcgggattccttttatggagactagtgcaaaagatgctacaaacgtagaacaggctttcatggcaatgtctgcatccatcaaagagagaatggctagccaaccagctgggaataatgcaagaccaccgaccgtgcagatcagaggacagcctgtggcacagaagaacggctgctgctcaacttgattgacgtgaccagcctagcaatatcctttccaatcttagaacacgtgttccttcttttgactaggctccaattcactactacttggtttttacacaacatccccccaaatctgtcttgtctgtaattaagctcctttggttggttattattctgtttttcacgtttcctatttgctttacctcatgatgaggtcctcatctttccaacaa

SEQ ID NO: 530 - DNA, 880 bp, Arabidopsis thaliana
aaatttgcggcggagaaaagaagataacatcaacaaaaaaatgatttctctattcatctcaaacttttcaaacttatcaaacttatctccgacatttgataacatgaacatgaacatcccatcgaagaagatcgtaccggtaccgacaccgagtgagaaagttgtctctttggtatctcgaaccggacgagatctgcaacgttacaacaccgcagggtatcgtcaagtcgtcggatgtgtaccatatagatacaagaaacacggaggaggagaaattgaagtgcttttgataagtgcacagaagaaagggaaaggaatgttattaccaaaaggaggttgggagattgatgaatcaatagaagaagctgctttaagagagacgattgaagaagctggtgttacgggtcagcttgaagaatcacttgggaaatggcaatacaaaagcaaaagacatactatgattcatgatggtcacatgtttcctttgcttgttagtcagcagtttgagatatggcctgaatctgaattcagacaacgcaaatgggtttctttgtctgaagcgattgagttgtgtcagaattcgtggatgagagaagctttggaagctttcattaaccggaaatgccagacccaataaggataatgtagcatctctgggaacaaagagctcttcatttggaagcagatgcatataattgaagagcaggtcctcaagtttagtgttctgatttgattcattcatttgttaatgatgttaggtagactaattgataataactgattgttctgaatgattgtcttcacaacatgtaatgtgtacatatataacatggatcaatctcatagatgttataacgacttggtcttcacttttgatttc

SEQ ID NO: 531 - DNA, 880 bp, Arabidopsis thaliana
ttttttttttttttaaaaaaaaataacgagaaatatttcaaattagaaagttttgtagcataacagagttgatagaagcgaaaacaagaatctgtaaagcctcctctggttttgggatgaagaaactacagaaacctgagaagaaaaaactctctgcgcttggcgataatggaacagtggtggagcttctatttttgcagctgtattctcttgtccctgataggcagatcaagcggtttctgggcctcgtgaggatggtcagggcctttgtacaccttcaggtgattgaacagagctctcccaagccgtccctttggaagcattccacgaacagcatgctcaacgattctttcaggaattctctgctgcaattgatcaaatgtctctactgtcataccaccaggtcgtcctgaatgcctcctgtacagcttttggttacgcttctttccagatacagcaactttctcagcattcaccacaatcacaaaagctcccatgtcgacactaggagtgtaagaggcaagattcttcccacggatgtgattagcaattgtcgatgccaatctaccaagaattttgtcagttgcatcaaccacaaaccagggcttgtccgtgttcacatggtctgaagcttttggataccatgtcgtgttccagatgtcagggccattagcttcttcttcgtcgaacatccatcgttgattcgccggaacaagagaagtcgtcgtcgtcggctcagcttcacacttcacttgcaatcctcttttcgaattcgcataaatgccgactcgtaccgacggcttcgagatagccgttaaagagaaccctaaaaacggagactttctctcacttccggaggatttcacggaagaagaagaga

SEQ ID NO: 532 - DNA, 879 bp, Arabidopsis thaliana
  misc_feature (1)...(879): n = A,T,C or G
tttaaaacggccttttattagttatagaacccacaaaattgggctgggctttggtttacaaagaaaaccagagacaaaggaaaaacgaaaaaatctgtcgggaccggaaaagaggatcttgccctagtgacaccgtgacgcagagaaaccgaccattagcaccgacggatgcgagaaccacagctttgcagcagatcgaagtatctagtaaacagagaggaagcatccgacttccgctactattccttttcccgcgaccaaccgtttccaccacaaatctctcggcatggtcaaccctccgacatcacggcacgccgttgnnagctcccgtacctagcaagccgacaatcaaacataacccctctttcccaatccaacgaatctccgatttaccgaacaaaaaaccttcaaccggccaagaggaagcaagtcacggtggtgtttgaggcccaaggctcaagcgaaacacccaannnnactgaatccgcgacagccaacaaatctaggaagatccaccgttaacctccatggcgaattggcactacccaccttctctcgatcgacttccgccgtagttgcagaggccgacacgacggctgagccacgagaagaaatcgctacaccaaccggcgtccacaaccgaagggaatcgtagcaactctctacttccaacacatcggatccacaactacatcgaaggagagaaaaaccacaccactgccaacggagaaggcatcttgttcacccctgaaatttcaaagcaaagccaaagagatgaagatcaaaggcaccgagaaaagcagatctagatctaaaaatttgttacagtgaggagagagaagagaggtttttttgggaacgattgtccttcctcttcct

SEQ ID NO: 533 - DNA, 879 bp, Arabidopsis thaliana
ccacgcgtccggacaaatctcaaggatgtgatactagaaggaaaagatgcattcagctctgcccacgacatgagacttttcgaatatattagttcggatgaccagttctctaagttgtttcaccgcgcaatgtcggaatcttccacaatggtcatgaagaaggttctagaagaatacagaggatttgaagatgttaacactttggtggatgtaggaggaggtatcggcaccatattaggtctcatcacttccaagtatcctcatatcaaaggtgttaatttcgacttagctcaagttttaacccaagctcctttttatccaggtacaaaactatacttagtatatttgctgtgctagtattactaactaatgtacctcctaaatcttttgtatggtttgactaatactaatgataggagtcaagcatgtctccggagacatgtttattgaagttccaaaaggagatgccatctttatgaaatggatactacatgattggggagacgaggattgtataaagattctgaaaaattgttggaaaagtctaccggaaaaaggtaaagtgatcattgtagagatgattacaccaatggaaccaaagcctaatgacttttcgtgtaacaccgtgttgggcatggacttgttgatgttaacacaatgctctggtggtaaagagcgatctctttcgcagttcgagaatttagcgtttgcgtcaggctttcttctatgtgaaatcatatgtctttcttattcatattctgttatcgaattccacaaataaggatttggaattcacgaattctgctacatgctaagttttcttttcaagattgtttagtgtattatattaacagattgtaataataattgtgaaagggt

SEQ ID NO: 534 - DNA, 879 bp, Arabidopsis thaliana
aaatccagtccaccaaagaaagctactcaaaagcgctcagcaggtaaacggaagaagagtgatgacgacagtgatacaagtccaaaggcatcttctaagaggaagaagactgaaaaaccggccaaggagcaggccgcagcccctttaaaatctgtatcaaaagaaaagccagtaataggaaagagaggcggaaaagggaaagacaaaaacaaggagcctagcgatgaagaattgaaaactgcaattattgatatcttgaaaggggtggacttcaacacggccactttcactgacatcctcaagcgactagatgctaagttcaacatcagtctcgcctcaaaaaaatcatctataaagcggatgatccaagatgagctaactaagctagcagacaaaagcatcataagaagaagaagaaactacaatagttaatcaatcaaagagaagtaagagaaatggcagattctaactgtggatgtggctcctcctgcaaatgtggtgactcttgcagttgcgagaagaactacaacaaggagtgcgacaactgtagctgtggatcaaactgcagctgtgggtcaaactgtaactgttgatgaaattattatggtctaaaatcatatatatggcagaaaaattggggaaaatatgtgttttatgctaagagatgtgtgtgtgttgttggaataaagacgtgaccgttgtgttgcgtatcaactctcttaagctttgacttttcccagctttgtattttcctatgtatggtaatggtgtgattgtgtaatgttttcatatgtaacgtaaaaaaaatatttatgtgacattgacttttgtgactaaaaaaaaaaaaaaaaaaaaaaaaaaaaaaaaaaaaaaaaaaaa

SEQ ID NO: 535 - DNA, 878 bp, Arabidopsis thaliana
  misc_feature (1)...(878): n = A,T,C or G
tttttttttttttttttttttttgacaaagaaagaacaaaggtgtaaccatttcaagacagaattataggctctgttgtttctgaaagttacaatggtgattggtgacacttttacatattttgttgtcaacagaggaaacatagggaatttgatctcgtcgtgtcacgacggtcttctagacctttcaagaaccatctcaccgcgaggtgctctgaagcataagtcatgaaggcagctagaattatggctagacccaccattagacccaacctcgtgaataaagcagtgatccccaaaatgtaaggtaaagaaactgcagcaatagccagaaaagccatccctaatccataatacaatgtagtaacgtcacaagacccacctgctcgctgatgaacttttgcggaatcatccaaggaagatgattctgattgtatcgctattctctttccatgttgatgcacaaaaagcaagaagacaccaaacaaaagaaagaagattgtaaaagtccattcatacaccaagaccaagccagtccatggcatgatttgcctaggcacaatcgcaaaggaaattccaagagataacagaacagcagtaaaacagacgacaactgaaactgcgcctaagtgttgaggaaccttggactgtgcgttgccactgtggggttgatagctgggactcatggtagatacaccgccataacnaagtgttccattagatctaactttgtaataaagatatctaatctgattgctgaacgagctccagcacaatgaaccctcacggccctgaatggatcggtaaatgcagaacaaaagtgcacaaagaggtaacaagaaaaggaacttgacgacgagttcatcatgttggttacta

SEQ ID NO: 536 - DNA, 878 bp, Arabidopsis thaliana
cctttttttcttttttttttttttttttttttttttttttttttgaccgtcaaatgatttatgctcagaaaatcaaacttcagcaaatccaaatacaactaacatttacgaaacacaaacaaattgttacacatgtccctcgttcattcatattttccatgcaacaaaggttacggaaaccaaaaatgaaactatgatagctatttataaaactgattcgaccaacaataataattagattattctcttgggtagttataataattgtaaccataattcttctcttcttcttcacgctgctgttgttgttgttgtagctgctgttgctgcgtctgttgggaggaagaagaagatgaagaaggcgttgaaaaaggttgactgaagagagtcgacgtgtagtatgataaatcaacctcattgttactcgtaagcaactgagcgtattgaagtatgtcctggttataagtcattggccacgaagtagtagtagttgaaggtggaccaggtcgaggaggaggtgagttcatggattcactaactcctcttggtgcatgagaaatggttgtggtggtagtagggccttggacccgttcagggaagttcagtttagccttggtgcctttgaatttgagggcagctcggtcataggctaaagcagcttcctctgccgtctcgaaagtcccgagccagacacgggctgctttctttggatcgcggatttctgccgcccatttaccccatggtctctgccttacgcctctatagtgtcttcttcttggttgatcttggtctggttgatgttgatccgatttatcaagctcttgtttgaccggcgggtctgtcggattctctatgacacggctgagagcggagaccat

SEQ ID NO: 537 - DNA, 878 bp, Arabidopsis thaliana
  misc_feature (1)...(878): n = A,T,C or G
ctcacggaagtggttaagcactcgactaaggaaaaggttgtcagggtggtcatattgacattcaggaaccttcttccaaaaggtacatttggtgcccagatggttgatcttggactcccacatattatccacagtctaaaaacacaagcatggagtgacgaggacttgctggatgcactgaaccaactagaagaagggctannngacaagatcaagaaattgagttcctttgataaatataagcaagaggtgctccttggccatcttgactggaacccaatgcacaaggagaccaatttctggcgtgagaatgtcacatgctttgaggagaacgacttccagatactcagggtcctcctcacaatcctggacacctcaagtgatcccagatcattggcggtggcatgctttgatatctcacagttcatacaataccatgcagcggggagagtgattgtagcagacctcaaggcaaaagagcgagtgatgaagctgataaaccacgagaacgctgaggtgaccaagaacgctatcttgtgcattcagaggcttctcctgggtgccaagtacgctagcttcttgcaagcttgatgggactcttccctgtttctttcagtataatgaaatgcaaccaaaacacacagattgtgtttccttttttcccctgtccaaaacaaaccgtgctcccaactcctgcatatgcttcttttctttcgattctacacattccaagacacatctgtttattatttatcctggagaatctggctattgtatgcttcaataatttctgggtttgtgttttctgtatttatttattcaataaagagtaaaagagaccttgaagaagaatgctattgttgcagacagacacattt

SEQ ID NO: 538 - DNA, 878 bp, Arabidopsis thaliana
ttcttcttccttctctcaagaacagattttttttaaacgagcttgatcaataaattctctcaagatctatggcggaagagcatcgatgtcagacaccagaaagcaaccgtctctgtgttaacaactgtggcttcctcggcagctccgccaccatgaatctctgttctaattgttacggcgatctttgtctcaaacaacaacaacaatcctcctccatcaaatccaccgttgaatcttccctctctgtatctcctccgtcgtcatcatcatcggagatctcttctccgatcatccctcctctccttaaaaatccatcagtcaagctagaggtaccggagaaaaaggcggtgatttcgctgccgacgacggagcagaatcagcaacagaggccgaatcggtgcacgacgtgtaggaaacgggtcgggttaaccggattcaagtgccggtgcggtacgatgttttgcggggttcataggtacccggagatccatggatgcagctacgatttcaaatcggccggacgtgaagagatcgcgaaagcgaatccgttggtgaaagcagcgaagcttcagaagatatgatcagagccgttcgatgcgttgacttttcctctcgtaagtcttcatttctacgcgtatgtgtgtcctccgtcccccgagaaatacggatggtgtcgatttgattgatctcagccgttggatcaaaaatggtttattattgtaaaagattgattatgtatttatcaaagggacacgtgtcacgtggttttaggatggagacgctttcgctttttctccttcattttattttctttttcctttcagaaagaaataagattattcgcgttggctttttctttttattaaaaaaaaaaaaaa

SEQ ID NO: 539 - DNA, 877 bp, Arabidopsis thaliana
  misc_feature (1)...(877): n = A,T,C or G
gggtggattttatcattacaggacagagtagcatagagatgtaatacaaagaataatctaaaatacagcacaaaattgacaaatcaagtggctacaaaagtacacatccaaaagttcttcctcttcttatccaatcttttgcaaatccttctccttctctctttctatatataataacaaaggtgcagcacatgataagagagcagctacatcaactatatgaaaagccctttgtctgcaaacaacttccaatgggtcacatgattgtgcacatacagctttttccacttccatgatgaaactcatcttctgattcatcaacttcactaggctcaaattctctgacctcagcaatctcaataccacatgtatcaggccactgcactttccttctatctatatgatccaccacaccatctctactcacatcatcatcaccaatcacaacatcactaaacgatcttttcttcaagctgcttttaagtgcaaacctattagtgacttcacagttattatagtcctccacactcggtgcctcatctttcttcccctcgctttccagtctttcggattttcgaccaaaacatatgagagaagtgcaagcagaagagagccaattcttagacgaatctaaccgaaacccggtatcagaaccttcaaccactaaatgataatggttccattgtgatgaaactttgataggtttttgttcagtcttttgacctaatagaagaagagctaaaccattgctataaccagaagctgatgaagagaagaatcctcctcnnnnngctgcaaataacatttccaatattgtctcatttgcacattccaacaacagtctttttgtacacaaactccaaatcccggacggatc

SEQ ID NO: 540 - DNA, 877 bp, Arabidopsis thaliana
ccacgcgtccgagtttccgcacgaatcacgaatctctctctcttcacacacttcacactttcaatatacactctcattatgactaccgaagagaaagagatcctcgccgccaaattggaagaacagaagatcgatctcgataagcccgaagttgaggacgatgatgataacgaagacgatgactctgatgacgatgataaggatgatgacgaggctgatggactagatggagaggcaggaggtaagtcaaaacaaagcagaagtgagaagaagagtcgcaaagccatgctcaagcttggcatgaaacccatcactggtgttagccgagtcaccgtcaaaaagagcaagaatatcttgtttgtcatatcaaagcctgatgtgttcaagagtccagcatcagacacatatgtgatctttggagaggcgaagatcgaggatttgagctctcagatccagtcgcaagcagcagagcaattcaaggcaccagatctcagcaatgtgatctcaaagggtgagtcatcgagcgctgcagtggttcaggatgatgaggaggttgacgaggaaggtgttgagccaaaggacattgagttggtgatgactcaagcaggagtgtctaggccaaatgctgtgaaggctctcaaggctgcagatggagatattgtctctgccatcatggagcttaccacctaaaccaaagtcttttctacttatatgtggtttaacctgagttatgtgccagagattgtccaaagaattcggaaatttttggtttcaatgtttttcatgaagtgattttcgatgttgtatcagtataaacctcataagtttttgattttcagtttgattttatattgaatatcaaaaaaaaaaaaaaaaa

SEQ ID NO: 541 - DNA, 877 bp, Arabidopsis thaliana
  misc_feature (1)...(877): n = A,T,C or G
gaatcattggagcatcatcaagcagttcgtcacgctgtgtcggagttggggccagaggattcagggagaaacatagtggacatcatcttcaaatctagctggttacgtaaagacagtcccatctacaagatcgaacggatattaaaagtccacaacactcaacgaacgatccaacggtttgaagattgtcgcgacgcagtcaagtcccatgcacatgcctctaccagaaaagaggctcggtccgccgccgacggcaacgagcttctccgcttccactgcaccacagtttcttgctccctcggctcacgcggctcgacctccatttgctccgccatccctggctgccgcgtttgcaccattatccgccatggcttccacgccaaaacggtacgtgtaggcaatggtgaaggaaaagaggagattaagggcgtgaggaccactgcaagcagtggaagagcacacgatgcgttgaggtgttttgaccagcggagggcgatgcttgtttgccgtgtgatcgcgggaagagngnggcgcgtgcagagtgatgtgccggaagatgaaagtggttctggctcgtatgattcggttgcgggggccgctggggtctacacaaaccttgacgacttggttgtgtataatccaaaagctatacttccttgctttgtagttatctacaaagtctccgagccttaaaaagttgcactttacacgatttggatttgtaagtttgttagtggaatgtgtgaagtagtggattgtaatatttaggaaaaaaagtttagcatattaattgtgtagattcatggcctagtcaagagtgaaagattcgttgtggtgtggcctagtcaagagtgaaagattcgtgtttttttttttt

SEQ ID NO: 542 - DNA, 876 bp, Arabidopsis thaliana
  misc_feature (1)...(876): n = A,T,C or G
tttttttttttttgatgaacaacccttctttttattgtccatactatgaaaagattgnnncggttacatatnnactcgataaaatattaagcatacaacaatgcatctcatgagttaccatacgataatgtggaaagaaacatcacaatctctacttgttcttacttttttttcactctttaggtaacattcaacaagaacaccgtagagattcaagtggtgtcatcgaaaccgaggtagttctttttagaaaccgagttaatgagcttaacactgaaatcccagagtttctgtgccaaagtctcatctctagcaagtttgcttggagtgacttcgttgcaatcagcaaagtactttcctgttactcccttcacacttggatgcagagcaacataacatgttgttgctgctccctgaggtatatttttccacaagtagaagctgaagaacttcaggaacctcattaaaagagcagtgtgttggaagagattggtgagaataagaccagggtgaactgaatttgctgttatgtttactccttcttcctgaagctgacgggagagctcattagcatgcaatatattggctagtttcgattgtccgtaagctcgcttatccgagtaactgcaaatgtcattgatgctgtcgaattggattccttcttggtaagtatagatatgagctacagatgatacattcaaaattcttccttcaacaccactggttttagctgtgttcttcattgtgtccaagagcaagtttgtcaacagaaagtgaccaatgtgatttgtagcaaactgcaattcgattccatcttcagagagttggtatggacagaacattactcctgcattgtttatgaggagattgagagga

SEQ ID NO: 543 - DNA, 876 bp, Arabidopsis thaliana
gctgtttatcgagatggaaaggcagagtataagatcactagggaccacctcaagtccttgttcgtggagcttatccttggaggcactgacacctcagcgcaaacaatcgagtggacaatggcaaagatcattaagaagcctaacattcttgagagattgagaaaagaaatcgattctgttgtaggcaaaacaaggttgattcaagagaaggatctaccgaacctcccttatttgcaagcggtcatcaaggaagggctaagattacacccaccagcacctctcttgggaaggaaagtcacagatggatgtacgattggaggctgttacgtaccaaagaacacaacacttgttgttaatgcttatgccgtgatgggagatcccgattcttgggaagatcctgatgagtttaagccagagaggtttctagcttcttcaagaggaaaagaagaggagagagagcaagaacttaagtacattccttttggcagcggaagaagaggatgtcctggagtaaatctaggttatatatttgtaggaaccgcaataggaatgatggtgcattgctttgactggagaaccaatggagataaggtcaacatggaagagactgttgctggaattaccttaaacatggctcatcctcttaggtgtactcctgtttctcgaatgcaactgcagaaatcgcagttcgtgagttcatgaattttgattagtaaacaaagaagctttgcattttatgtttccatgtctaagttttttccggtctagttggttacttttggtttattgtgaaaacctataaacagttgtgtattgttcttctgttgagttgtggatcggtttcatatttaatgactttcaattaaaaaaaaaaaa

SEQ ID NO: 544 - DNA, 876 bp, Arabidopsis thaliana
tagatgtatgtaaaattatacactcagcatcaagaaacgatcaaagagttagagtgtggcattacattacaaacacaaacaggaaaaaacaaacaaaatttcgaaaaactgttcactctcttcggctttttgttgtgtgaaggtataactaaacaaagattctgattcgtcttcgcaagatgatgatgatgatgaggcttacctttgaatctgagacgtggtctgagctaaaacgatgtcagaagtcgtgagagttcctgattcatcgtaatcaagttgctcgaactcatccattatcccagaaatatctttctcatcaatcttacccatttctttcagtttatacacaataaactctgcagctccaacaactccatcttcatcgagatcagctgcttcgagatcattgtttgtgattcttcgcgttaaaacccatttcaccaacgccctctgtttgttttctgtatttagctcagctacataaaggaaaaactgagccaaacatatgctgctcgtcaagatccaaaacacagcaaaaaggcgtccggcttccgagttaaagctcttatctccataacccaatgttgtaaccgtggagcagacgcagtagaaagctgagataaccggcattttctcaaccattacaaggaaaatcgtgccaacaatgaagaggactacaaggacaaggcatgtagcatagcatttgtatctcaacttgttagtatgcaactccttgagaatgtctgttggaccaaagctttgacgcaaatggaaagccctaacgagcaaagcctcttgtttctccactagataatccgccgctcgacttaagaggtgaccaacgaggaccattcccgagaagacgaaggcggccgc

SEQ ID NO: 545 - DNA, 875 bp, Arabidopsis thaliana
  misc_feature (1)...(875): n = A,T,C or G
ccacgcgtccgcatggcttcgcttcctgttcaattcacgaggaatcaaatctcttcaccgtttttctctgtaaaactccgccgtgagcctagatctttagtaacagtacactgctccgcaggagaaaacagagaaaatggtgaaggtgtaaagaagagtctctttcctcttaaggagcttggatctatcgcttgcgcagctctctgtgcttgcactcttacaatagcttctcctgttattgctgctaaccagagacttcctccgttatcaacagaaccagaccggtgtgaaaaagcatttgttggtaacacgataggtcaagcaaatggtgtctatgacaaaccactggatcttaggttctgtgattacacaaatgatcaaactaatctcaaaggcaagactctctctgcagccttgatggttggggctaagtttgatggtgcagatatgactgaagttgttatgtcaaaagcttatgctgtagaagcaagctttaaaggggtgaatttcactaatgctgttatcgatcgggtgaatttcgggaaatcgaatctgaaaggtnnggtgtttaggaacacggtattatccggttcgacatttgaggaggcaaatttggaggatgtggtctttgaggacactatcattggttacatagaccttcagaaaatatgtaggaatgagtccannnnnngaagaaggaagacttgtgttgggatgccgatagagaagagagaaggttttgatttgaatgtattatatatgtaagatttaagatttgttgacacaaagatgtatgaaactaagtaaaggttgaaggataggagtcaagagagttatgagaggttgtataatcgattcttgtaaattctgtaacc

SEQ ID NO: 546 - DNA, 875 bp, Arabidopsis thaliana
  misc_feature (1)...(875): n = A,T,C or G
cggttttaagagtcgaccggacccgaaatccgataccggaagcccggaaaacccgaatagcagcagtccgatttttactaccgacgtttctgtaccggccaaagctagaagcaaacgctcacgcgccgctgcgtgtaattgggcctcacgtgggcttctcaaggaaacgttttacgacagtcctttcaccggagaaaccattctctctagccaacaacacttgtctccgccaacctcgccgcctttgttgatggctccgctagggaaaaagcaagccgttgatggaggacaccgacggaagaaggatgtttcttcaccggagtctggtggcgcagaggagagacggtgtctccactgcgccacggataagactccgcaatggcggacaggcccaatgggcccgaagacgttgtgcaacgcttgcggtgttaggtacaaatcgggacgtttagtgccggagtatcggcccgcggcgagtccgacgtttgtgctggcgaaacactcaaattctcatcggaaagttatggagctccggcgacagaaggagatgagtagggcccatcatgagttcatacatcaccatcacggtacggacactgccatgattttcgacgtttcatcggacggtgatgattacttgatccaccacaacgttggcccagatttcagacagcttatttgatttgatccctttttatttttccaataatttaattagggattatcttcttagatcaaattttgctaatctaaattttgatgatgacaatttacttatttcttcctnntaatcttatgttttggaatttgctagaaagcttttgttgcattcctcatgacatgaaatgaatttttttagtttttactaaaaaaaa

SEQ ID NO: 547 - DNA, 875 bp, Arabidopsis thaliana
ttttttttttagaaaattcgtgttttcataacaagatgtttacatgaaccaagtatacagacaaatcaagaactgaaaaaggtaaaatctcacactgtttaactgaattaaactagtcttaaagtcgaaaccagatacttaaatgaagcaagcaaagcaaagtaaatgtatatacctttcaggcgtaaaggaaacaaaacaaaacaataaaccgatttcttgttgaatcacgtaaagtgcagaaaaaactcttacttcgccattgaagcaacaatctcctctagctgtctccaggtttctccattcttctttttagtatcttctgctttttgctgatcttcttggaacttgtgcaaacattcttcgaataaatcaggatttgtctcggacaaaaccttgagaacattctctgtcaagttcttcacagcctgattccaatggctgctaccgtttttctccaaagcgggaaacactataggtaaaatgattctactgttctgtctcactaaattagtgacatgatcgttgttccataagtataaagcccgttccgctacctgaaagtgagaactgctcaagcactgagcaatttggcgagagagcggaaccatacaccgttcaaactctgttaattgagttgcttctagtatctcctccaattcattcaagaacatgatttctttagcgctattagtaacaggccagtacttcaacatccctctaataacggtatccgcgagcttacaatctttctcaacaaactgtataacgcagtaagaaagctgttgatggtaatttggtaagcatttcagcttgtgcagaggaatcaagacacgagtaagaaagagcttgtgttcttccttgagtggtaaagc

SEQ ID NO: 548 - DNA, 875 bp, Arabidopsis thaliana
ccacgcgtccgggtagagagagagcaaaagtactttcattcagacttcagtttaagctatggcggcgaacgattcttcaaatgctattgacatcgacgggaatctcgactccgattcgaatcttaacactgacggtgacgaagcgaccgataatgattcctcgaaggcattggttactatccctgctccagccgtttgtcttttccggttcgccggagatgctgctggtggcgccgttatgggctctatcttcggatatggttcaggattgttcaagaagaaaggcttcaaaggatcatttgcagatgcagggcagtctgctaagacttttgctgttttatctggagtccacagtttggttgtttgccttctgaagcaaatccgaggcaaagatgacgccattaatgttggagtagcagggtgttgcactggtcttgctcttagtttccctggtgctccacaggctcttctacagagttgtctcacgtttggggcattctcttttattcttgagggactcaacaaaagacaaacagctttggcacactcggtctcgttgagacaccaaaccggactgttccaagatcatcatcgtgctttaccactctctcttgctctcccgatccctgaagaaatcaaaggagccttttcttctttctgcaagtccttagctaaaccaaggaagttctaatctcgtcttattattctccctttcttgtgtcttaggctctctctatgtagatgtaaaattttcccgcttttgttgtactttgtgagacatgttttgtgaaaggctttttgcaagagccaatttgaagagaaaaagagttgtgtactttttgctttattgaatacgatctttactttagacttta

SEQ ID NO: 549 - DNA, 874 bp, Arabidopsis thaliana
ccacgcgtccgcacaaaacttgaaaactttgtctttggttgtggccgaaacaacaaaggtctgtttgggggatcctctggtttaatgggtttgggaagaagttcagtctctttagtctcccaaactttgaaaactttcaacggagttttctcatactgtttaccttctcttgaggatggagcttctggctcattgtcctttggtaacgattcctctgtttacacgaattcaacttcagtttcctacacgccgttagtacaaaaccctcagcttcgttccttttacattctgaatctcactggtgctagcattggtggcgtggaactgaaatcttcaagctttggcagagggattctaatcgattcaggaacggttatcacaagattgccaccttccatttacaaagctgtgaagatagagtttctgaaacagttttccgggtttcctactgctcctggttattcaatcttagacacttgctttaacctcacaagttatgaagacataagcattcccattatcaaaatgatcttccaaggtaacgctgagctcgaagtggatgtcactggtgtgttctactttgtcaagcctgacgcatctctagtctgcttggccttagcaagtctgtcatatgaaaatgaagtcgggatcatcggaaattatcagcagaaaaaccagagagtaatatatgataccacacaagagaggctaggaattgtcggagaaaactgcagagtctgatgcctacaccataacttaatatccatttgtgtgctcccttcatatcatgaaagccaatcatctcttttggcaaagccaatttgaattctcccactaatcttataaataaatatatttctgtaaaaaaaaaaaa

SEQ ID NO: 550 - DNA, 874 bp, Arabidopsis thaliana
  misc_feature (1)...(874): n = A,T,C or G
gacaagctcaaaatgagtaagcttcagagtgaggccgttcgtgaagccatcactactatcacagggaaatccgaggcaaagaaacgtaactttgtcgagactattgagctccagatcggtctgaagaactatgaccctcaaaaggacaagcgtttcagtggatctgtcaagttaccacatatcccccgtcctaaaatgaagatctgcatgctcggagatgcccagcatgttgaagaggctgagaagatggggttggaaaacatggatgttgagtctctaaaaaagcttaacaagaacaagaaacttgtcaagaagcttgcaaagaaataccatgctttcttggccnctgagtctgtcattaagcagattcctcgtcttcttggtcctggtcttaacaaggcaggaaaattcccaactcttgtgagccaccaggaatccttggagtcaaaggtgaatgaaacaaaggcaacagtgaagttccagctgaagaaggttctgtgcatgggagttgcagttggtaacctttcaatggaagagaagcagatctttcagaatgtgcagatgagcgtcaacttcctcgtctcgctattgaagaagaactggcaaaatgtcaggtgtttgtacctcaagagcacaatgggaccaccacaaagaatcttctgagctttcacctacttaaaattggtggctataagacacttcttcttaccctttcgtttttgtttcagacatatctgttaaacagtgtaagagttgtgctgctactctcctctttagcttttggtttggataatttgaaataactgcagtgattttggttaatggattttgtagcttatattatctttgaattagatgtgcttatttcaaaaaa

SEQ ID NO: 551 - DNA, 873 bp, Arabidopsis thaliana
  misc_feature (1)...(873): n = A,T,C or G
ctgcttgatagtatgactgacattgatccatcagtttatgccaacttcttttgggtctcttctcagtaccataaagtccgtcaagagttctctgagttctataaaaatgctcttctttacctcgcttatacgtctgtggactcactctcggaatcatttaagctggatttggcttttgatttgtcgctttcagctctacttggggagaatatctataactttggggaactgttagcccatccaattttgaaaagtctgcttggaacaaatgtggaatggctttaccacattctacaagcattcaaccacggagatttagttcagtaccaagaactctgtcgtgtgcacaatgcatcgttgagtgctcaaccagcactggttgagaatgagaagaaactattagagaagatcaacattctctgccttattgagatcattttcagccgacctgctgaagataggaccatacctttgagtgtcattgccgagcgtactaaactttcaatcgaagatgttgagcaccttctcatgaagagcttatcggtgcacttgatagagggaatactagatcaggtgaatggaacagtttacgnnncatgggcgcaaccgagggtgttaggaataccgcagatcaagtcattgagggatcagctagacagctgggtcgataannttcacaccacattgttatctgttgaggccgagacacctgatcttgttgcagcttaaactctnctttcctnnnntttccttcactgttcgtttaagctacagattgtaacattctctgaggattaaatgcaacttccttttaagtnnntaggtattacagttatacttttgaactttgttctccacagacacatgaatcta

SEQ ID NO: 552 - DNA, 873 bp, Arabidopsis thaliana
ccacgcgtccgcatcattatctctttttctaaatctctccaatggcgtctcttcgtagcctttcgatttggttcttcttcttcttcgtcttcgtcttcttaatcaatccctccatttctattcgaacttccttcatcaagcttcccggaagcgacggatctcgctactgcgacagctggagattagccgccgagaccaataacgtcggaacttgggatctgattccgtcaatctgcgtggattccgtcgccgagtatcttaacggagaccagtttttatccgattacagtgtcatcgtcgattatgctctcgcgtttgcgaaatcggttgaaatttccggcgacggcaaggacgtgtggatcttcgatatcgacgagacgcttctcacgaatattgactactacaaggctcatggttacgggtctgaaccgtatgacgataataaatttagtgagtgggtggaacaaggaacagctccagcttttgatgcgagcttgagactgtacaatgctctcaagaaacttggtttcactatcattttgctaaccggtcgggacgagcatcaaaggacttccaccgagacaaatctccgggatgccggttattccggttgggaacgtctcctcttgagaggtccaaatgatcaagggaagtcagctacaaattacaaatccgagcagcgatcgaaactgattgaggaaggtttcaaaatccgtggcaatagcggtgatcaatggagtgacttgcaaggttttgccgtggctgatcgttctttcaaagtcccaaatcccatgtactacattccttgatcactattcatttctgattttatgtattgagtaacaaccacttatgtgttttagacgttaatat

SEQ ID NO: 553 - DNA, 873 bp, Arabidopsis thaliana
tttttttttttcacataaccttaagttctataaatatgcaaccacaaatctccaaaactcaagaaacaaaaaaatctctaaacacatatacagaagaaagcagaaactaaagtaagaaaaaacaaacaaacaaaaagtatggggaactgtttagtaatggagaagaaagtgataaagataatgagaaatgatgggaaagtagttgaatacagaggacctatgaaggttcatcacatcctcacccaattctctcctcactactctctctttgactctctcaccaacaattgtcatcttcatccccaagccaagcttctctgtggtcgtctctactatctattgccccaggagactacctcaatcaagcacatgaagaagacgatgaagaaagtcaggtttgcaaatccagaggtggaaaaagaagaacaagaagaagatagattaacagattgttgtgacaacaccaaggagaagactaatggtgttgtgagagtgaagatggttgtgagtaagcaagagctggagaagctgcttcaaggaggttctgttcatgaaatggtgtataagactcttgctaagcaacatctgtgtgatgatgatgatgagtgtcataaagaaggctggagacctttgttagatagcattcctgaaaatgtatgtatgtacttgtgatggggctaatcttctttgttttcaacttcgagagagacctcgttgcggcgcataaacgggagagtgaatggtggattatactgtgcaacttcaaatgatactccatctctcactcggaacttcttgtcattttgaagagctctccttagttctctctcccgtctctcgatctcttcatcggtaacatagcctgagaaggcg

SEQ ID NO: 554 - DNA, 873 bp, Arabidopsis thaliana
  misc_feature (1)...(873): n = A,T,C or G
ttagattttaaagagtctcaacaacttaaaccacttgaattagtaatactaacaaaataaaaatacacataatagttacaaatatacgaacagaatcataaaagacatttctccttgaggctaacaatagtgtctctaaggcttgatttcataggagtgaactctactcccaaatttttcactttctccacacacacttggcatatcatctcattcatctcactttcttcattcgtatcagcaatagacaaatctgggaacagcttccgaagaatgtctataatgtcgtttacactcatatttggaccatcgatgatgtatctgccattggctgaaggagtctccaacgctttgatatgaaccaaggcgacatctcttacgtccgagaacctgtagtatcttttattgaaagggttcttaccatttatgaaatccacaattagctctaccgacatgttaagagttggttgcaagagtggtccgcaaataaatccaggattcaacacaaccatgtcgattccattgtctttggcaaattgccacgctgcattctcggccaaaatcttggagagtgaataccaattctttgtctccctgcatagacttggatcggagaagaaagtctcgtccaccaggtcgtttggcccaataggaggctgacgagagagaaccgcagccgtggaagatgtcagaatgaccctcttgacagaagaaacttgtttgcatgtattaaggacgttaatagtaccctttaannntggatcaatcagctcagtctgagganntgtgacagtgaatagaactggnnnagcagtgtggaagacagcatcacaaccatcgatagcttgatcaaaagaagattcttccaaaaga

SEQ ID NO: 555 - DNA, 873 bp, Arabidopsis thaliana
  misc_feature (1)...(873): n = A,T,C or G
ttgcattgtcaccattcacatttgttttcgcgaacacaggccagcggttcatatatctggtaatcgaagattgcaaatgaaagatttgagttttatgttttgaatttttgcctcttttttatttttctttttcttttccctcttaatctcttgtattgtaattttgattgtgtaaccaagaaatccatcctcgtgatgtttttttttttttataagaaaatatcatgcaagttagaaaaaaaaaaaaaaaagggcggccgctcgcgatctagaactagttgcacttatgccggagtatgatccagtggccaagatatcgattattccacgtggccaagctggtgggctcacctttttcgctcctagcgaagagaggctagagtccggattgtatagcagaagctaccttgagaaccaaatggctgttgcacttggtggaagggttgcagaagaggtgatctttggagacgagaatgtgacaaccggagcatcaaatgatttcatgcaagtgtcgcgggtggctcgccaaatggttgagagattcgggttcagcaaaaagattggacaagttgcagttggtggagcaggaggaaaccctttcttgggtcaaagtatgtcatcgcagaaggattactcgannncaacagcggatgtggttgatgcggaagtgagagagctcgttgagaaggcgtacgtgagagcgaaagagatcataacaacacaaattgatatcctacacaagcttgcacagctccttattgagaaagaaactgnnnatggagaagagttcatgagtcttttcattgacggacaagccgagttatatgtttcttaaaatcaactaattggcttgtaataataccaattagcttc

SEQ ID NO: 556 - DNA, 872 bp, Arabidopsis thaliana
  misc_feature (1)...(872): n = A,T,C or G
tttagctccatccttcattcaaaactccggaaaacaactaaataaacaagaagggcaccgtttacaaagaggtattaaacggctgcgtattttgcttaattatctctgaatccaaaaataaataaaagcacaattacaataaccaaaaaaatctttccaatgtttttttttgtttctctgatcttgatgaaaaagtttcaaagaagacaaacttcttgatcttcagcgataaccatacgactaagaggactaggtccaagcttcttcttcctcctcatctgatttctcttcctcacaatctccatttgatctctctttctattctccattatcgcttcttcttccgccaccacgaatctcctcatcaacgcgttttccctcaacgacttccctctaaatatcctcctccctgaatccacactcatcctcgccgtcgccaccgccactgccgtctccataggaagaggcttcgacggaggatagcttgaacttcttctcggcgggacgtgaatccgaaaaacgtnntcgtatggaccaatcggagcgcagaggcaaaccctagtgaaagaattcgcagctaccttgagagacgagcattttctcagctggtgataaatttggttatgattggatgacttgctgttgacgctagggtttcgagacggacgaaaattctctggttgttgttgtgatgatgatttagggattgttctccaattcgttgcgaatctggcaaccgccatagctctctggtaccaaggttttcttgcaggtgaggcctttgaatcttgcatgaaacagaagaagacgaagaatgactgtgtgagtgaatagtttagagagagagatagccaagagatagagaagaagat

SEQ ID NO: 557 - DNA, 872 bp, Arabidopsis thaliana
ccaagtcgaaggagaagtgtacattacaagattcagagatatacaacaattagagcattttcttcaactttgtttgtcaaggtgaacgatgtcttctatggtttactcgctttaggatgtaatgccgcagtcttttgctaaaggcctccaatctttccaatttttcgtgtctaggcttctttgcatctgtttcacctccgttcttaatcttcttctccttactgtcttcttcttcttcttctctactagaatctcttggctttcgttccgtgtttacatcagcagttttctcgacctgatcaccctcgccagctgtcaaactctcatcttcttcagtgcctcctagtgaagagcatctgccccagctttccctgttggagcttgtaaatgaacagccttcttcaaactgatcaatacgctttccctcgaagttttcagggtcgtccacgttgtgatcattatcttccacaagcacggtatctgtatctatcatgggcatagcttctgaaaggagctcattcgttggctttgtggttagaggggcaggaggtgcagaagaagaacttgcaacatcgatacatgccgaacgaagaccagatatgatctcatacagaaaactctcatccaaaccagtagcgctattgacatctcccaaactgtaataactttcaagtttagatgagtaagatgaagaaattggaggcgggcgaagaacattgtagaagaatactaatactgaatcataataagactgcgggcgcgaagagttgtgatcaccatcaaacttgatgatatttttgtctccctgcaaatttccagaagataggtacataaaaatgaaaaaggattgatatgcttgaacataaaaaccg

SEQ ID NO: 558 - DNA, 872 bp, Arabidopsis thaliana
  misc_feature (1)...(872): n = A,T,C or G
acaaatctgaaacaaactcagtaggcgagctttactatcaaatcgagcctgaagaagctcaatcaacgagaacgaaagctgtgctggatctctttcatgaaatcatagaagagccattgttcaatcagttgaggacaaaggagcagcttggttatgttgtcgagtgtggccctcgcttaacgtatcgtgtgcacggtttctgtttctgtgttcaatcttctaagtacggtccagttcatttgctggggagagttgacaatttcataaaagatatcgaagggcttctggaacaactggatgatgaatcctatgaagattaccgaagtggtatgattgctagattgctggaaaaggatccctctctcttgtccgagacaaatgacttatggagtcagattgttgacaaaaggtacatgtttgatttctcccacaaagaagcagaagaactaagaagtatacagaagaaagatgtgatcagttggtacaaaacctatttcagagaatcatcacccaaatgtcgtaggcttgcggtaagggtttggggatgcgataccaatatgaaagaaactcaaacagatcaaaaggcggtgcaggtcatcgcagacgcagtggctttcaagtcaacttctaagttttaccccagcctttgctaatgagaagaaacatacaaaagagttttgcttcgtcttcccnnnnnnntatcnnntatattttgattcactcaattttcttcataccctcattggataggttatacttttgggtgacaaacaccaaaaatatccctttttgttacgatttgagaatacgctttttaaattattatttttatctggtggataatttgatatttattgattagaaaagcatta

SEQ ID NO: 559 - DNA, 872 bp, Arabidopsis thaliana
  misc_feature (1)...(872): n = A,T,C or G
aggtttctgagatcttccattcgtctcgaattaagttgctacgatgaaaacagcaaaggggaaagataaagttaagaccacaaaggaagccttgaagccagatgatgacagaaaggtgggaaagaggaaggcaccggctgagaagcctactaaacgagagactcgtaaagagaagaaggctaaaaaggacccaaacaaaccaaaaagagctcctagtgccttctttgtctttctagaannnnttngggtcacgttnannnaagaaaatccaaatgtgaaggccgtctctgctgttgggaaagctggagggcagaaatggaagtcaatgtctcaagctgaaaaagctccatatgaagagaaagctgcaaaaaggaaagctgaatatgataagcaaatggatgcatacaacaannacttggaggaagggagtgatgaatctgaaaagtctagatctgagataaatgatgaagatgaagccagtggggaggaagaactattagagaaggaagcggcaggtgatgatgaagaagaagaagaggaagaagatgacgatgatgatgacgacgaggaagaagactaaatcagggatagaaatcagattttgtatctcaagctnnactgcagatccttaagcagaagtaagtattttgtaatttgtgtgtggacgagaactatagatctaaaatcgtgtgtatttttgtttttcttttcctaagaaagcgaaacagttgttagcatctctcaggatgtctgtttcagctttttgccgcaacaaacaatgtaccaatgtctgcgttagtgatcatccaaaccaaaacataaactaatgtacatatgaaaatctcccttctctcaaaaaaaaaaaaaaaaaa

SEQ ID NO: 560 - DNA, 871 bp, Arabidopsis thaliana
  misc_feature (1)...(871): n = A,T,C or G
ttcattatcttcttacattgtccattttctttaggtacaatcttgtctattggaacattgtagagatgtgttctactttacaatcatggatcattgatccaaacattacatgaattgatcaggaaaagtaaattggaaatcacgtagggcagaagagttgggagagtgaagggagatcccaaatgggatcggtaggatcgnnnattgcatattctgcattcatgttgtcatagtaactgttagctccattcattgcatatagggacgcagatatctgtctttcaatttctgcaagacccaaatgttgatcggttgagtagtgatcgttgagatgtccatgtgtttctccccctgcctgagccaatggaatctgatggttgaatccagagacaaggggccacgaataaggaagctggagaccctcggtttctggttgcccaatgaccgatgaatctggtcggtacacattattgagcggtatggccgtggtagtggtggtggtggtggttgtggtgagactagtagcagtcgagatgtagttgatgttgcaatccgttaaagaagaaactggtttgtgttgttgttgttgctgctgcttcatgctctgcttctggtgaagaagatttctgatcttcaaagatagttgtgagttgttaggaaaatggtttgcgaaattggtgcgagtattggagccacgtaagagacatgcagcttcatcgtaggctcgagcggcttcttctgcggtttcaaaggttccgagccacatccgtatcttttgtgtagtgtctttgatctctgccacccattttcctgaaggcctttgcctaactcccacaaacttagtcttgttgcctttgctcttctccttagt

SEQ ID NO: 561 - DNA, 871 bp, Arabidopsis thaliana
ccacgcgtccgccacaaagcgtaacaaagagagtaataactatgagtgatttttcaatcaaacccgatgataaaaaggaagaggagaagccagcaacagccatgttaccaccacccaaaccaaacgcttcttccatggaaacgcaatctgctaacaccggaaccgctaaaaaactgcggcggaaacgcaactgcaaaatctgtatctgtttcactatccttctcattctcctaatcgccatagttatcgtcatcttagctttcactctcttcaaaccaaaacgcccaactactacaatcgattccgtcaccgttgatcgtctccaagcttccgtcaatcctctccttctcaaagtcctcctaaacctaacgctcaacgtcgatctctctctcaaaaaccctaaccgcatcgggtttagctacgattcgtcgtcggcgttgttgaattacagaggccaagtgatcggtgaagctcctcttccggctaaccgaatcgcggcgcggaaaacggtgccgttgaatataacgttgacgctaatggcggatcggttactctctgaaacgcagctttatctgacgtcatggctggcgtcattccgcttaatacttttgttaaagtcactggtaaagtaaccgttcttaaaatctttaagattaaagtccaatcgtcttcttcgtgtgatctcagtatctctgtttcggatcgtaatgttacgagtcaacactgtaagtattcgactaagttataatcagatctgtagattctaccacactttgttcttgttttgttttttggtatttgaattggtttgtatttaatctctatgtatgttttatttactttaatgaacagagatttgattttgttaaaa

SEQ ID NO: 562 - DNA, 871 bp, Arabidopsis thaliana
  misc_feature (1)...(871): n = A,T,C or G
gaagcttcttgatctctgcaatgcctttagctctgagcttacccgtctcaaccaaggtcatctcttactccagtttgctctgcataacttggaggccaactctcctcagaatctgtcgaaagctcagtcatcactagacagttggaagcaacacattgtctccaagaacccgagaatagaaaattgccgtgcaatcttgagcagccttgttcagaccttgaatctccccaaggtgaaaaactcggccaaagggaaagtcttgatgagagctctatatggtgtaaaggttaagaccttatacatctctggtgtttttgctgcagcgttctcaggttcatcgcnnaatctgatgtaccttacagtctcaaacgagcttccatgggcacaatcattcatggaagtgcagaacaccatgaacgcagaaatcaagaacatatttttgtcagacgggttaacggttctgaaagagctagaggcagttgcttcaggtgtcaagaaactctaccctgcgatccaacaaggatcaatagatcccatatcgctgcagccactgaaggactcggtcacagaattatcgaatgggatagatcttgtttcgaaagaagtggattgtttcttcaagattctgttatcggggagagacacattactagagaacctaaggtcgatgggtgcatcaaccctacaggcaacatcgccaaaaaaggctgccggaaaaaattacagaggattctgataaactataaatgtttgtacagatggttttacttcaagtgttccatcttcttggtattgaatgtattattaggtttttgtgcaatcttagtcgtttgtatgagatgctttgaaagtagtagttgtataagtaaag

SEQ ID NO: 563 - DNA, 870 bp, Arabidopsis thaliana
  misc_feature (1)...(870): n = A,T,C or G
ttttttaagaatttcttgtttcctcattaatctgcaatctaattcaaatgtgcaactctctccttcataaaaaggnnnnngttttcgtttttatctgcacaagtgtttcaaatgaagacatgccgaatcaaaacgttacaatatgttctattgcttatccacagcacagccaccttctagcactgtcccgcttactctgtttggtggccaataccgaaaaaccgaccgtccaataatattcttcaaaggcagaggaccccatacgtgcgaatcataactgttattccggttatcacccatcacaaagactgaattttccggtaccctaattggtgtcatttcataaccaggaggctctaagatgaatttttcattcctagcaacaccattaaccatcagtttcccattatgtacctccacaaggtcaccttctttggcaacaatccgtttaataaatacatcggcatcagtatacccaacttcctgaagaactggtggacttttaaagatgacaatatcatttgcacaaggcttcctgaaataataactcaccttctctgcaactaatctgtctccaacatcaaaagtaggatacatagacaaagaaggaatatatcttggttctgcgataaaataacgaaacgccaacgatacagctatagccacaaacacagtctgtgcatcatccgaggtaaaatccaaccattccggaaaaagtctgtttttttcctccacttcacctttatcatcatcaccaccatctccgccgccaccgtcgccggagtctaatgacggcgcagacttcgttgtctcacttgaatccttaatcccatagcaactcagagttcgccggtttaaatttgttccggt

SEQ ID NO: 564 - DNA, 870 bp, Arabidopsis thaliana
tcctcgtctcttcttctctccggttctactgtatcttcttcgtttatcgctccatctaagccttctctcgtacgaaattccagtaagacatcactgttaccatttcgtaatgtttcgagaagcttcaaaaccgtcaagtgcaccgttgattcttcatatggaggcaatgttcccacgttccctcggacgagagtttgggacccgtacaaacgtctaggagttagtccatatgcttccgaggaagaaatctgggcctctcgtaactttcttttacagcagtacgctggacatgaaagaagcgaagagtctatagaaggagcctttgagaagcttctcatgtctagttttatcagaaggaagaagactaaaatcaatcttaaatcaaagttgaagaagaaagttgaggaatctcctccgtggctcaaagctcttctcgatttcgttgaaatgcctcccatggacactattttcagaagacttttcctctttgccttcatgggtggttggagtatcatgaactctgcagaaggcggtcctgcgtttcaggtggcggtatcattggctgcgtgcgtatattttctgaatgagaagacaaagagcttggggagagcttgcttaatcggaattggagctttagttgccgggtggttctgcggttcgttaatcattcccatgattccgacgtttctcattcagcctacatggacactcgagctcctaacatcactggtcgcttatgtgtttttgtttctttcttgtactttcctcaagtaagttacgttgtggttttatccaaactctttttgttcttttcgcccagacatttacagaacctttcggaaaaattagtgaaagttgttaagtgaaaaa

SEQ ID NO: 565 - DNA, 869 bp, Arabidopsis thaliana
ttgctgtcacaagtttcatgctgcgtgtgttgactcatggttaacctcttggagaactttctgtccggtgtgcaaacgagatgcaagaacgagcacgggagagcctccagcttcagagagcacgccattgctctcatctgctgcatcgtctttcacttcttcctctctgcactcttcagtcagatcatctgcactattgattggtccttccttgggctcattaccaacttcaatctctttctctcccgcatacgcaagctcatcctatattagacaatcattccagtcttcctctaaccgtcgatcacctccaataagcgtaagtcgaagctcagtggatctcagacaacaagcagcttctccatctccatcaccatcacagagatcatacatttcccatatggcttctccacagtcactaggttacccaactatctcccctttcaacacgaggtacatgtcaccgtatagacctagcccgagcaatgcatcacctgcaatggctggatcatcgaattatccattgaatccactgcgttacagtgaatcagctggaactttctctccatacgcctctgcaaactcgcttccagactgttagaaagtctacagaaccaaccactcttggttcaggtcatataagattatttcttttgcatttgagttttactacgaaacgtacttctggcgtttgtgtgtggtgtgtgtgtgtgtaacgatgcttttatagtcttttggttaagatgaaacatcatcggatttaggttagagagattttaacacttcgacaatacacaaactcggttcctttgtacaaagaaatatgagcttatgtatatacacgtctctttccttgttaaaaaaaaaaa

SEQ ID NO: 566 - DNA, 869 bp, Arabidopsis thaliana
taaaaaagaaaacaaaatctttataaattttgattttctctttttcacccgattattttgatttgactgttttacgacagtcaatatttcaattttattattgggtgctgacgtggcatgcatccaatagagtatcaccatgaacaccaaaacgatgcgtcttcccccacgtcgcgttctaacggcggataagcgcaaagaacgagacgccttcatctcctccgtcaccgataatccgccggaaatcgccaagtttccctctccgccgcctaaacttgttcctccgccggttaatcccatttccaagaaatcttcaaccgcagcagccgagccgatcggctcgaaccaactgatgttagccggttatctgagccacgagtacctcacccaaggcacactcttcggagagcaatggaaccaggctcgagcccaagccgagtccagtaagataaagccgagccatactgttgagccggctgaggaatgtgagccgaaacggaagaggtatagggaggttgctaatcttctccggtcagatggggcccaactgcccggcatcgtcaatcctgcccagcttgcccgatttctcaaactgtgatcggcgtaatccggtgtccacgtggagacagatcattggtctgtcgtccggcaagcgagacagccttaaaaccgaaaccttcttctctctctttttttttcaaatgtttttttagaatcctctctgtaaagctgactcgctcgctctctcttctcatcatcgtcttcctcggaaatcgactgagaaaatttagggtttgttgttgaggtagatgctcctcttttgtacatcagaaatatcaattagccaatggattatgttttcagatcaa

SEQ ID NO: 567 - DNA, 868 bp, Arabidopsis thaliana
cttttttttttttttttttttttttttttttttttttagttaatagcacatagtctatatacgcctgcatatcaccagactgagaacaagttggatacacatgacaagttctagtatatacattaactaaaattggacaatggtggggattgctgcggaagtatttttcctatataacacaaagaaaacttatattgtgagctgattcacttcatcgagcaagagctttgtaatgccatcagaattggtcggccagttgaggaaatttctgcagcagccaggtaactccctttatagcagccagaactgtttctccaggtttgattgcaggctcaacgcagtctcttccatatacgatctgtctcttcccatcaatcacctctaaccggtaaaagctgcaacctttgctaaatgggaagttctttcctttccattctaaatgccatgaaactccaacagctgaagagtcttctgttgagatatcatctatcacgaattggagatccgtacttgttgattcaatgaattttccgaagaaatcaagaattgcctttcggccaacaaagggagatgagaagacgagatcctcgtagacgcagtcctgagcgatgaggtctgtgacagaggataaatcatggacgttaacggcggcgtagaagctggagacgacctccgacgctgatgtcggagctgtttctggaacaacgtcgttggctgtagcagcttttgcagctggaccataggatgcggacaatctcggaggctgtgaatgagtgaggcttgttggcttgacaagtttggttgggaggaagaaggaaggaggaagatggttgagcgagacgagtgagggagacgtcaaataagagac

SEQ ID NO: 568 - DNA, 867 bp, Arabidopsis thaliana
  misc_feature (1)...(867): n = A,T,C or G
attgaggcctatattacaagagaagacaagaagcccgagacaactgatgaccacagacttcttcaaacaaaatggtttaaaccgcagcctctagactctcctatctcacctgttcttggaccaaacaacttcctctggctcggagttgtgatcttatcatcattcgtcatgtttctcttgctcatagggatcgtcacacgttactatatataccctgttgaccataatacaggatccatctacaatttctcatatagagggctttgggacatgtttctaggaagtgcgtgcattttcatctcttccagtgtagttttcttatggcgcaagaaacagaacaaagaaggggataaggagttcaagaatcaggtacaaagcgtagagtttcagacacccacttcttctccaggttcatggttccacggccacgagagagagctcgagagtgttccctatcaatctatagtacaagccacttcagtccacttcggctccaaacctaatctgaaaaagattctacttgaggctgagggttcagaagacgttggggtgatggtttgcggaccaagaaagatgagacatgaagttgcaaagatatgttcatctggtttggctaagaaccttcactnngaggcaattagnnncaactggtgatgtattccatgttctaactatgtgtgtnnntattcatcgtaataacttttgatgnnntagatggtttgctgtttgattttctatttttaatacaatttaaaatggaatgttaatgtatatgttatcctgcaccttcattattatcaatttctaatcatcattaatcctattgagcccattatagacttagtgagtgttttttcttaaaaaaaa

SEQ ID NO: 569 - DNA, 867 bp, Arabidopsis thaliana
cggccgcaaacaacgtcatatcaacaaagtgagaacacacaaattacaaaacatcagtaatatagatagatcctacacggcaacaaacactcgttttacaaaacacagtgatgaaatttaggatatgaaaactacatatatatataagggaggaagaagcattagggattggatctgaaaggattacgctcgtttaattgaggatcaaccttgggagagagattgtatccttgaagcagatcgcggatctttgagtacatcatcacctgtgacgggtctcctcccccaccactgctttgtgatgccacccttgagttttcctgcagcttaatcttctcaaacagatactgcttctctgcctcggcctcactcagcctctgtttcagatagttacttgcgtattcctcctcagacttatccattttcgctagtacaatcctctgcaacctatcagcctcccgctttgcttcatttgctttaagctggaacatgtctgcctccgcttgcttcagcctcacgattctctctagctcatctatctgaagtttcttcttctgcctctctgctttcagttctgaaacttccttggctttgtcttcgagctctctatcgcatgtctcaagagccatgcgtgccttcttgaacattctcatcttctcctcagccactatctccattttcctcaaagtctcttgtacaacttcagcaattcggttgcatgcatcctgaggtgccatcaaacgtccaccttctccattttcaaagctcttcgcagagtctgattcgatctcttggaaaaacattaatatcaatttggcagcagttgcttcagccaaaccacctttaatcttgtcaataagctcctca

SEQ ID NO: 570 - DNA, 867 bp, Arabidopsis thaliana
  misc_feature (1)...(867): n = A,T,C or G
gtgtttattttattttctaatggtaagacaaacaacaattttaaacatatggtatttcatgtactgtatatggatgcaagcctaaggatctcaaactagtaaaataagaacaagaaggtatatgacccaaacaccatcatgttgcagtgagcacctaaggcttttaactcttgtttttgacaaacgattttacccgagaaacacaactaagaaactgagatctcttccatgccgctaatttcttcagtcagctgatgctgtactttgggctccaagtcgatgaactggtttgacttgcttgctagatgtgagatactaactcttccttgacgtttgatgtaatctgcaaccnnnttcatctcttccattgatatgtaaatgtatttccctctatcatccatgacccccgagagccgcccaatgctctccaaagaggcgatcctgttgatgcattcctgagtacgtagatgaaattctgcagcgagatcttcaagtggaacacatttctgtttctttatgtattcaacaaattctgaaagcaaatcttgattcccaccttgcacttcctctgtagtaccttcagcatcaactgaaaattcccctttccatttgtcaaactctaacgcagctgcctcttcttctttggcttgtcgcgctttttcttcttcttccaacttcagctcttctgcctcgcgttcttcatccttcttcctccgcatttctgcataccaatcttgttttgtattccttgactcgcgtgtagcttcctcagcttgtctttgtgcttcccgctcttgtcgcttcttctctttcttctttgatgctctggcttgagttccaccagcttcatcttcatcttcatcttca

SEQ ID NO: 571 - DNA, 867 bp, Arabidopsis thaliana
  misc_feature (1)...(867): n = A,T,C or G
ttttttttgacaaaacaaataaccatatagagtacaaacaagatcaaggtaacatataaactgaattaacatggaacttgaaatgattggtcactttattcaaatcacaacgaaaagcgaaagccaataattaattaaatccagcgtagagcaattggtagtagtcttgtttatgccacgaccgggggatttaggacggcataagcaagcaactcttggtcatcgacaaacacggacatgtcttcctcaggtaagcttatccatgcttctacaccatcaccttcttttgaatcaatcaacacgacacccaccatgttgtcgtaaatggtatgtgacgcgtatcccacccagaccggactacccgatccgaagtcaacctcgtagaaaggctttctgcaccagctagacattatgtatcggtctatctccgttgactctgacacagtttccgccatcaaactcaacaaactctgaccaattgtattgccttgaagactctctttgatcatctcgttgactctctctttgttcttcctgaatgtggccacgatttcagggatctcaaactcgctctccgcgtctttcttgagagaaaatccgctttgtaggttaccaatcacgtcttttggcgcaacactagatnnaatcctaagtcgaatgtccatggcctgccacatgacggcttgccttggaattaacnagttagagcgtgaggagtttctagcacatctccagataagtgacatgatagcttcaacacgtgtaggcacagggacgctttcgctagcggccttgtgtttcagctcagcaatcttagaaggttcgaagacgaatcttttgagtacgtatttacttgtgatgttagaa

SEQ ID NO: 572 - DNA, 866 bp, Arabidopsis thaliana
  misc_feature (1)...(866): n = A,T,C or G
caaactcaaacaaacaaaggcacaaaaagtgcatatatatcataataagtattttgtaggtggagaaaacatagaataaagtaggttgttcttaaaacaatttaaacttcaaatgacaaacatatttacgataatacccttaatgtgaatcatgcaagcacctcaccacgaggttgcaaataaacacgtaaaccgttcttcatgaaaagcgtnnnnnnnatcttttgctcaacgcggtgaccgggaannnnnnaaacccggtaacggaggagaacggctgaagccaccgacttcatctgattataagccaagtcctttcccaagcaagtccttggtccggcgttgaacgctacgaacttgtaaccatctttgggagtctcaaaccgttcaccgtcggctgtcagccaccgttccggacggaactcgagacaatcttcgccccaaattgttttcatacgtccgatcgagtaaatcgagtaggtcaccgtcgagcctcttggcacgaaagtcccgtccggcaaaacgtcatcgtctacgacgtatttgaaatcctgaggcacagaagggtataaacgcagcgtttcagccaaagcagccttgaggtaaacgagcctatctgcctcgtcgaactctaacggctcctccgtccatttctcctgatcattgccacgtgtctccttcagaaccatcgacaactcgttaacgatcttcgtttccacctcccggttattcatgacgagccagaagaaccagctcaaggccaccgaagaagtgtcacggcccgcgagaacaaagttaagcgcgatacgctgaagaacatctgttggaagaacgttaccgttaacgtcacgtttcttcaagaaacg

SEQ ID NO: 573 - DNA, 866 bp, Arabidopsis thaliana
tttttttttttttttttactgaagctaatccggtttatttaaattgagtgcaatgtcgtcgattttaaaagggtacagtaaacattttgttattacggtttatcatactttcaacaaaacgacagaaataacaattacaaacctcacatgaaacattataaaagacagaaaataacagtcttcttgaaacccaaaccattttgctacgctgctccaaatttcttcctcaggacataaacatactcaatgatcctatcagaatcagccaatgccttgaccacactctctctttccaaacacctcttggtccacgtagtcaatataggaaactctgtttcgatactgaattcaccaaatttctccatggccttgaaccagctgtagtatcccattaatgcaatgtctaggtatccaaatacttcaccaccgtaataaggtttgtctccgagctctgtctcaagtgtcttgaaatgttccaacaattccttcttcactgctgcatgttcttcgcccattgttgcccataccttccatgatgggtcgtaaaactttttgtcgatgaattcagcccaaaatctagctcgagacttctggtaaggatcagagggaaggattggggatgcatcggaccaaacctcatcaatgtactcaagctgaataagagattcacaaatcggtttaccgttgtggatgagaaccggaatcttcttgtgaatcgggttcatctctatgagtaaaggagtcttaacccatggatctgtttccttgtactcatacttgactcctttctcagccaaagccatcttcgtcctcatcccgaacatgcttggccagtaatcaagaagaatcacttggtcgttcgccat

SEQ ID NO: 574 - DNA, 866 bp, Arabidopsis thaliana
ccacgcgtccggaaacggtctcaatcttattttcagcgatggcgatgtcaattctaaagctaagaaatttatcggcactaagatcggcggcaaatagtgcccggatcggagtttcatcgaggggtttctcaaagctcgcggaaggcactgacataacctcggcggcgcctggcgtttctctccagaaagctcgcagctgggacgaaggtgtttcctccaaattctccaccacgccattgtcagatatcttcaaggggaagaaagtcgtcatctttggtcttcctggggcttacacgggagtttgttcacagcagcatgtgcctagctacaagagccacattgataagtttaaagccaaaggcattgattctgtcatctgtgtctctgttaatgatccctttgctatcaatggttgggcagagaagcttggtgccaaagatgcaattgagttttatggagattttgatgggaaatttcacaaaagcttggggctagacaaggatctctctgctgcattgctcgggccacggtctgagagatggtcggcttatgtagaagacgggaaggttaaggcggtgaatgtggaagaagcaccgtctgacttcaaggttacaggggcagaagtcatcttaggacagatctaaaaagtatttccagagttgctgtttcttctgagttgcaactgataataagtttgatccgaacatgtctcaaggatcagaccaagtaacagcttcacttcttttgttttgtttccacagtttcagtttaaataaaacttatgtgtcttgccgtttctcaccaaatgtaaatctggttcataatatgaataagaaaccaatgtggttgagggatataaaaaaaaa

SEQ ID NO: 575 - DNA, 866 bp, Arabidopsis thaliana
ctttttttttttttttttttaagaaaaaatatgataattaaaacgaatattgcataatatattgtcaacaaaaaacaactgctaatataaatccaaaccatatcccaacaagcacagatctctgaaacaaaaacagaatgcaaaattctgagatggaagaaggataagaagagagagctcaaaagattctttgtggtggtcccatggtgctcttcaagtacaaacaccttacgttttgccaattcttcttcaagagcgagacgaggaagttaacactcatctgcacattctggaagagctgcttctcttccatggaaaggttaccaacagcaacacccatacacagaactttcttcaactggaacttcactgttgctttggtctcattcacctttgcttccaatgactcttggtgactcacaagtgttgggaactttcctgccttgttaagaccaggaccaagaagacgaggaatctgcttaatgacagactcagaagccaagaaagcatggtaagacttagcaagcttcttaacaagcttcttgttcttgttaagctttttcaaagcctcaacatccatgttactaagtcccattttctctgcctcctcaacatgctgagcatctccaagcatacagatcttcatttttgggcgaggaatatgtgggagcttcacagatccactgaaacgcttatccttttgtgggtcatagttcttcagaccaatctgaagctccactgtctcaacaaagttacgcttcttctcctcagattttcccttgatagtcgttatggcttctctaacagcctcactctgaagcttactcatattgagtgtcttctcaggtcacgaatctctgatcctg

SEQ ID NO: 576 - DNA, 865 bp, Arabidopsis thaliana
taggaattgatcaacaagaagattacgcatcttaagtaaagcacacagaaacatcaagataaatagatacttatttatagaagtctttatagatcgacacaagatatgaatgaggaggttctctagggcttggcgtctccatcaaagccacgttgaagaaatccaacggatgatagatgtgatacatcgctccacgaatcgatgatccatttttgatcacggagatgaaccacattcactgaagcattcaagagttttccggcagaggaagcttgtgtgatccttaagtaaattgccctcaacactcctccatgagtcaccactatcactctctctcctttgtgcttcttagcaatttgctcaagagcatccatggatctatcagcaagttggtcaaagctctctcctcctcccggaatctcgaggtcgttttgggaagagaaaaaggcagagtaagcttcaggttctttctctgctccttctttccaatacaggccttggagactacccacgtgcctctcctttaagtcaggtacttcgatcacctcgggacagaaacaagttttggcgatcataagagcagtgtctttggctcgtttgaggtctgatgaatacacagctacaggtctttcctcttttcccaacctctcagcgattgcaacagcctgctttagtccaacctcgttaaggtctgattcaatttgtccctggattcttccggcagcattccaagtggtttctccatggcgaacaagaacgatctcagtcacttcactttcaactttgacatcctcgctccatttgaactccctctctgcatcgatccattcatgacccatgttatcggaaggggtattggtatttg

SEQ ID NO: 577 - DNA, 865 bp, Arabidopsis thaliana
  misc_feature (1)...(865): n = A,T,C or G
cttttttttttttttttttttttttttttttacaaagtggtcagctcgaggacgaatatataatgttttgctaaagagccagccaatatattggttaaaacttgaaactgaaattagagataaccgatttgatcagacaagaagagaaggagaaagacaaagtacttggatagcagtaattataataacatcgacatcaacagattacaacgcaagtctttcttcattaaccgagcttggcaagaacattgttcaaactcgagacagtttctgagtaatacttctcagcatctgggctactctttgatctcgccgcatagtccaagttgtcaatggtttggaaaagctttgcggtgagatctttaaggctttgcttctcttccttaggcttagcggagataacggtgttgagatcgtaacggaggtacgatgctcttaaacggagatcgttctgaacatagggccaagcttttttgtcgataaatgacttaacgttgatgatctctttagcagaatctttggctctagctgcagcttctgttggtgacaatggttgtatgtaaaatctatctttcaatgccaatgaaaagtctcttgcttggtctgagttatctgttccaggtaggccaccggaaggaagtggaggaccaccnnntttgatcggaatagcttcggcgaaaacagctttaacgaatgaaccaccggctaaaccagccgccacgagtccaatcactgaccggcgactactttctggtactgacacgttctgctgagccctgatcacaagtccggttctctgagacccaaccgagactcttgagatgttcaaacggtttgagccgttgatctgtaaacttccttcaag

SEQ ID NO: 578 - DNA, 865 bp, Arabidopsis thaliana
aattttggaaaatgaaacaaaacatctcatatatagtcttgaggaatttacaacactttgacataaatggatgatactttgagctaaaaaagaccagagacagagagagagaaaggatgaaaattatttagttacaagaaggaaagattgaaggaaggacgtggcctttgtgttagattcttttgatatccttcattccaattcatgaatggcctcaaaaaggctcttcttcttcttcttcctcctttgattcagctgctccctaatatgtctttgtatgtgctcttgaccttctcaaacaaagcctccctgtctggtttgaagaccaggttcttgtaagtgaaccatcctgtgtaaccgatgcctacaagttcaagaacaccaggaaccaatggaagcctatcgattgccgaaatcattccagcagaaccccaaagagccactacactagcaaaggcaagagaaccaatagcgtacttgtcatccactttctcccaagcttcttgagcagtcttgacgatttcaggtaactcagtagtctcagcttcggtagtagtggcaggagcttcaccaacttcagtagtagctctcgtcacaacgttcctcacaatcttccgacagtaagcagtggctttagcggcacgggtatgagactgaatcggaagtgtgggaagtgaaatgcacgacggagaagaggcggaggcggaggctagtcgagaaggaggagctcttgaatcgatgatggttgaagaggaagagactgaaagagaagccatagctattgagcttcaagcctcggaagaatctcacagaaacaaaaacaaaacagaaacaattaggtttattatctaaaagattaatggag

SEQ ID NO: 579 - DNA, 865 bp, Arabidopsis thaliana
ttttttttttttttttttttttttttttttttttttttttttttttttttcattcatattcttgaaattacgaatccataaaagtttgcatattccacgaacaagtgtttaagaaactttgacatgacaaaaggcgccaacaaacgtagcaacatgaattatttggaacatgtttttttttcttatcgaaatattccacggctaaagaatataataaaactcgaggtacaaaaccagataaccgttgtgcttggatcataccccatattttggcaacacaaaatctgtatcaggaatttgatgatttatgcagagcgggaacacgtaatttgtcaaagtcagtctagttttgcaatgaccgcatcaacgacctcttgagtcgtgcttgttccaccaagatctttcgtccggcactttccttcagcgatgactttcttcactgctgtttcgagccggtcagcaaatgaaggaaactgaaggtgtctaagcatcatcgctgatgagagaagcaatgccactgggtttgctttgttttccaatactatcttgtctttcccaacatttcctgctgatgcaccttgctcgaataccgcatggtcagccccaacatttcctccaggcatgactcctgtgcctccagcaataccagcagcagtgtttgcaactaaattcccatagagattcggcgttaccatgacatcgaattgctctggtttggctacaagttgcatacagcagttatcaacaatgatttcattgtaggtgatgctgggatactttttcgcaacctcgcgacaagattccaagaacaaaccatccgcaagtttcatgatgttagccttatgcaccgctgtaactttcttcc

SEQ ID NO: 580 - DNA, 865 bp, Arabidopsis thaliana
  misc_feature (1)...(865): n = A,T,C or G
gtgcctcccccaaaaacaaaattggtagataacgagcaattgtttttttttcagatttgatcctgaatttttacatttttttttgcaatctccccctaatctgttgtcccttgcttcttcttcttctgttaatcatctgtctttcaaaaagaaagaaaaaagaaaaattcgatttctgggtttgtttttgtcatacagaaaaaaatcaagcttatgaatttgtgtttaattttttgttttaatttgaaaggcaggtattttcagaacgagatcggtttttcaaatttcttctgattttacctctttttttcttcttagattttagtgaatcgagggtgaaatttttgattccctcttttcggatnnacacataggttgcttatttcaaaccttttagatccatttttttttaattttctcggaaaaatccctgtttctttacttttttataagtctcaggttcaattttttcggattcaaatttttattttaaatggcagctgctatgaatttgtacacttgtagcagatcgtttcaagactctggtggtgaactcatggacgcgcttgtaccttttatcaaaagcgtttccgattctccttcttcttcttctgcagcgtctgcgtctgcgtttcttcacccctctgcgttttctctccctcctctccccggttattacccggattcaacgttcttgacccaaccgttttcatacgggtcggatcttcaacaaaccgggtcattaatcggactcaacaacctctcttcttctcagatccaccagatccagtctcagatccatcatcctcttcctccgacgcatcacaacaacaacaactctttctcgaatcttctcagcccaaag

SEQ ID NO: 581 - DNA, 864 bp, Arabidopsis thaliana
tttttttttttttttttttgttattaaaaatctcacattttatttcacggaacttaatcaacaaatttcatatttatacctcacatcgcaggataaaatcaatagaaagcaaaacaaatctttgctattaaattttcaaaagagaaatttcaaacataagacaataagtccaagaccaaaccctagtccgactttcttctcaccggagcctgacttatccgacggtgacgctgccttcttagtggagccggagtcatcggtaaccccaccggatttagatttaggggcaggagcaatcggcgaaagcttgtgctctccgaacatctcaccgggcaacaaaaccatgtcgacaacataaactgcgagaggacgttgttgcctcaacgaattgctaatacgtgtctccacataaccagtagagacattgatttggtttgtttggccggtgaagttaagcccgtaaacaccgttgtctcggccagaagcttgagtcctaaccgggttactcacggagaggagatcatccatactgtaatatttggggctaacgtggtagagaatgagtttaacttgatcgtcagggcttaactagtttagggttccgggtttaaggttttgaaaagcattgtctgttggtgcgaacaccggcataccttcggatgaactattgacttgaatgttcacttgactaccgacttgagtgatgtttagaagatggatgaaagtagtgaattgaccacctttttcgaggatcgcagtgaggttgatgggaccagcaggctctggagcgggggctgccggctgagccgttgccttggttgcgagtagtacggctgcgatgaggaggagaggagctagagttag

SEQ ID NO: 582 - DNA, 863 bp, Arabidopsis thaliana
acttgaaacaaagatctgttttggtaaccctcaacaatacctaatatgtttaatcgaattaaacacaaaggaatcgtcacagtagttctaagaaaagtagtaaccataaaaccaaagcatacaacttatacaacataagttgtctaagtcatgacaaatacaaagggacaaaacataaacaaaccatcaacagagagaccagtgactagtgttacttaacaagtagaagtaacctttgccagtgtcctcttaccttattcaagacgcacactgaaccagacagaaagacacacacaagacgcagaccaaattttgaaccacacaaagaaaaagaaacacagcatcactcttcctcggactcagactcagcattctggagccactcgatgaacggagtcacgttcttcaaaaccggggagcttttgacacctttattgtaccattcaacaatcacatcctcatccaaaatgtcttcatcgtaaagacctttgataacaagagcaacttctttggcagcctctgcgcttgccttcatgcaaaaggattcaattccattaagcaaacccatctgcgcaggagctcctgcttcttcttgcatcatcatcaaggccaagagatatttcttcttcttgatcacctcttttgcgaatcccttgcctgtgcctccaaagagggcagagaataaggcgtccattttctcctgggggtttgctgagtttgaagctagggctgttttgagttgggtaggagatgaaccactgctcagaagctcctttatctcattcacaagcttttcatgagcattttcagggatcttgctattgccattctcatgcacttgttctggtgccttccggacgcgt

SEQ ID NO: 583 - DNA, 863 bp, Arabidopsis thaliana
tttttttttttttgtcaaagtatctaaatgtttcttaacaatgatgcaacggaatagtaaccattgaaaatttagtgttattgtaacatgaaagcggtcttgcaactaggaaagaaacatttcggtaaacaacacaaacgaaaacaaaacttgaaattcagatatgtttcggtaaggagaaatttgaagtctctaaatcttgttgaaagcgacaatgtcacaactctggatgtactcgttgttaggctctgaggtgaggaagtcttcaatgaggttgtccggggacacgaggtcatcaacaatcgtgaacataattgtgagtttcttgatcccataaccaactggtacaagttttgaggctccccagaaaagaccaggcatctcaacaccacgaacagcctcttccagtttcttcatgtcggtttcatcatcccatggcttaacatccatgagcacagaagactttccactctctttaggcttcttggtgtccttcttagcagcctccctctcctctgcagctttcttttcttcttcggtctcgtcaccaaagagatccatgtcatcatcatcatcagctgcagctgcaggtgcctcagcttcaacagctggagcagcagcagcagagccaccgaattgtactccaacggcctttccagggaaacttttagcaagttgggaagccacggactcgtaccacttgctagcattggggaaggcatcgctgggtttcactggaacggcagcgtaaaccttgacatcatccacagacaattgatctccggagatgtaggtttttccggcgaggtgctcctccacggatttgacaccctcctctgtgtgtagatctgaaaaggtaacgg

SEQ ID NO: 584 - DNA, 863 bp, Arabidopsis thaliana
  misc_feature (1)...(863): n = A,T,C or G
ttttttttttttttgagaactgaaaagtgagtctttcctgattatgaattgatgatgatatatattatttacaaaggccgtggacagatctttttgcaaacaaatagatagtgccactcttgctgttacatccagataaagataatacagatttgtgttacatatataacaaaagagatgctgctttctcagactatgccaaagaaccttcatgttcgcgatatatctcctccgcatgagctgtagttacgtaaactgcattggcaagcgaactgtttttccgaccatagaaaacatacacaatcactcctataagcagccacaccgatacacgagcccatgtcgcagatccaaggttaaccaaaaggtacatgttgatgagaatgcagatgataggtaggaggggaacaaacgggcacatgtaacctccagaatgtccaaaagtgtgtctcgcatcatcctgatctatggaactcagagcaatcaaaccagcaaggaggagacatccaccaacaccacacaacggatatctaataagccctgggaagctcaggcttgatgccgcataacttaaaaggaaggccccaacacatgtgaacataatgcnccatccagcgacaatccttctggtttcctcgctgagaannnnnnaccctagagcttcttgattcttgataagtgggacatcgaccaaagcatcattattaactattaaaggctggtgactgctatcggaagtaccaacatgaccggatgacgttgtttcaccacatataaaggaaacagaatcaattctctcttgaagagatgacggaagaggttgctcatctggaggaacatatcttagtatcaacactcggacg

SEQ ID NO: 585 - DNA, 863 bp, Arabidopsis thaliana
  misc_feature (1)...(863): n = A,T,C or G
attaagcttcaccacaactatgggaacaagtggtcgaaaatcgcttctcaacttccaggtagaacagataacgagatcaagaatgtgtggcacactcatctaaagaaaagactggctcagagctcaggaactgcagatgaaccggcctcgccttgttcgagtgattctgtttctcgtgggaaagatgataagtcatctcacgtagaagattctttgaacagagagactaatcataggaatgagttgtctacatctatgtcttctgggggttccaaccaacaagatgatccaaagatagacgaactcaggtttgagtatatagaagaagcttatagcgagtttaacgacattattattcaagaggtagacaaacccgatctgctggagataccatttgattcagatcctgacatttggagtttcttagatacttcaaactcatttcaacaatccactgcaaatgagaacagctcaggctcaagagcaacaacagaagaagagtctgatgaggatgaggttaagaaatggttcaagcacctagaaagcgaactcgggttagaagaagacgataatcaacaacaatacaaagaagaagaatcatcatcatcatcactcttgaagaactacgagctcatgatacattgataaaagatatttattttggatatcaatatgacaatatgtatgatggaaaggtagagagatagtagagaaaatgtatttcctatagtttnntaattggcattatttttagtagcctgtagataaaacagagctggtcaaaagatgcacactatactaaaagtctaaaactatatatctggaagattctttctttagtcttagagaatcttgaagaaaaa

SEQ ID NO: 586 - DNA, 863 bp, Arabidopsis thaliana
  misc_feature (1)...(863): n = A,T,C or G
ttaaaaaaaaaacatggagaaaacccaagaatcagtggttagatatggaaaaaagatcgagaaaatgccatatcttatgcccgccggccgagttgtctttgcatctgcgttcctcgtgtctgcttggagagagtattatggtttcggattagctgccgatgagttaagaccaaaacttggtttctttgagaaccaggcaaaagccatagttgctcttggtatattgatgaagtttgttggagggatcttattcatcttcaatacgtacgtattgaagatgcgcttttgcttgtataccaagccatcttgagcccgatattgtacgatttctacaatcgcgattacgatagagaccatttcaccgttttctacacaaagttcaaagaatttgtggaagagacgacgtcagctgatggtggagtggccatgagcctctatacctcngtggttaacgaagaatcgcgccagaaattcatcgatcagcttaacgagattgcgagaatagccatctcgaatcctctattcacaccaagcgatttcaacacattgttcataaggtttattaagggtgttggaatagcagctgcattggcgtgcttcattgcgatgaaacataggcatgcggtgctcatcgagaagacgtccaagaagcaaaaaactaactgatccgatttggcttatttacttgtggatctcaatcaacaagtgatctctatgtttttcaataattattagtttcttttaagatttgtgagttttgctttttgctatgaataaatagcaagtatttaattatgatgttgtactgtaatttcatatccgaacaaatttaaatttccttcggatcaaaaaaaaaaaaaaaa

SEQ ID NO: 587 - DNA, 863 bp, Arabidopsis thaliana
cgtccgaaaacttaaaaatatctcgtcacatatcttcatcgacaaaaaatttactgaaagcgaaaaaaataatggcagctttggcatcaaacccccaaatgctaactagacaagctcacggtaacaagaaggaacaattgtggaggaaagagagtttaaatttggagaagaagtgtgggttttgtgtgagcgtttacagtaatgaaaagcttgggaggtcacatatggagaaagagtggagactaaaagccttttggtcaaacatagctcagcctactactttggagatggaacccattaacaacgttgaagaactcgatgctgttctctctcacgcacgccaagtctctcagcctatcatcatcgaatggatggcttcttggtgtcgaaaatgtatttacttgaagcctaagttggagaaattagcggcagaatataataaccgagcaaagttttactatgtggatgtaaacaaggtccctcaaaccttggtgaaacgaggaaacatttcgaaaatgcccactattcaggtatggttactttcttgtaatacatgcaactttattgttttgagtttcttgcgatgcatttgacaataaggtgatagtgaaaagagtaaatgaacataataatgagagaaatgagtggtgaatgcagttatggaaggaagatgagatgaaagaggaggtgattggaggtcacaaaggatggcttgtcatcgaagaagttagagaattgatcaacaaatttgtctaattctctcattttttttcatttcctaccttttttttcttttaaaaaaattaatatgtacagtcagttttcttattttctttctttatacaatttcaaacttaaaaaaa

SEQ ID NO: 588 - DNA, 861 bp, Arabidopsis thaliana
  misc_feature (1)...(861): n = A,T,C or G
gaacacgttagtatgtgagtaacggagaaaacaaaggacacaacaacaacaaccatgataagacaggaaatgcttgacacatgcatctcacaccttgacacatttccatcccctctcctagtaatgctcttctacggcaaccaaacacagagaaaaataaaacaagtggtatgtctatcatataagcatttgggggagcgatcacaagggcaagaggaggacggggcnggggatgaactcagcgagtagattggcgtcaatgtacttagagtggatgnnnnnnatgctcatcaccaccagctccatcttcagctcatctgccacctctcctattatggnngtcgcttttttnncttccccaagcctctcnaacagcttgaactcctcgaacccaccttcagacaaatgccaccggatgttggatacttgagtctcatgctccgaagatgattctctcttttcttcgtcaatgactacnnntgtgatatcagctccatacttctttgccaagctggttgttgtagcagcagcctgtctggtgccttcagaaagataaggattccgatcaatcaccggcaggagaagatgcttcacattactgaatgcgtctcccactcccactggacttggactagcttctgcttcttttgcctgcgcctttactcgacctttgagagcgacactgcgtagggagagaagctgctggcgaggtttagatcgaagagaagaaagagggtagagcgcagaggaagaagaagaagaagaaggaagtgttgcttgcttggaggccgcatcgagaacagaaacggcggctatggagtgagcagatgccattgaagttgcgacggagttcagcaacta

SEQ ID NO: 589 - DNA, 861 bp, Arabidopsis thaliana
ttttttttttgagctctagaaactccaatccatatatgccacttttaattgtgattacataatcaaataaaaagagaattaaagtatgaaaaagtcctctcacctgaggaacaaatcttaaaagatgaatttggtggaagctgtgacaactaaagagtttacaacttggcacaaaatccaactgcaaacaaatgcaaataacaaaattctattcagatttgtctgtatgagatcaatctgatcctttattggttttaaaaatggcaaagcaaataaggtggagagagagtgattttatcatggatccttctccgacagcttcttcaatcactcttaccctcctgagatccaatctcttgtaagtaatgctctgcatccaatgccgccatgcacccagttcctgcagcagtgatggcctgtctatacttcttgtcttgaacatctccagcagcaaatacaccaaccacgctcgtcttagtagtacctggcttggtcacaacataaccatcttcatcaagctcaagctgcccatccaaaaacttcgtcgctggctcatgaccaatagcaaagaacaatccagacaccttcagatctgaaacatccccagtaacaacattcttcaccttcaatcctccaagaacacgtccattttcatcaccatacgcctcaaccaccgcagagttccaaatcacttcaatcttagggttagacaaagctctctgctgcataatcttagacgccctaaacgtatccctcctatgaataatataaaccttagatccatacttagtcagaaaattcgcttcctccatagctgaatcaccaccaccaataaccacaagaggcttattcctaaaaatc

SEQ ID NO: 590 - DNA, 861 bp, Arabidopsis thaliana
cgacgatcactctcattccctaacaaaccttgcggccgatcatctccatcgtcaaagccacgtgtctctcatcacacaagatccatcagtctaccctgccggtctcatcccttaatctcccacgttaaccacgagatctctcagctcaaatcctggttctcattcgccggagaaactcacagccgcaccacctcttggatcaccgacggtctcagtctcctcaaggacgttcaagaaacgctcgctgatatacttcagctcccacaatctcaagaatctctacgaaaccgtcctgttttcttcgagaatcttctagaagatcttctccgattcgttgacgcttacggaatcttccgtacgtcgatcctctgcctccgtgagcaccagtccgccgctcaagtcgctctccgtaaaaaagacgacgagaaaatcgcatcttacctaaaatctcgccgatctctcgcaagagatatcgcgaaactgacgtcatcgatccgtgagccgaagacaaaacaccaacactgccacgtagacaacgttaacggaacgtacggtgacgcagagcttgcgtcagttataggtgacgtcattgaagtaactgttttggtttccgttgctctctttaacggcgtttacttatctctcagagccaccaaaacaacgccgtttatagggtttttgaaacgatccgaaaaaaaggagaaactagacgaaggaatcgtggagttgaagcaagttgaagagaaaagcttgattggtttaagcaagaagaagaacgaagaagtaaagagtttgatgaagaggatgatggaattggagaattcgatccgtgaaatcgaatgtgagagtgagaaagtgttt

SEQ ID NO: 591 - DNA, 861 bp, Arabidopsis thaliana
ttttttttttttttttttttactttaaaaccaagagagttttatacctttatttcattgatagcaaaacatgaaaaaaaacgaaaactcggagagcagaaacaacgattacatcacaagcatcaataacgttgtcgtataacaaattaaactcatcaaacttctctttgtaaggttattctggttgataaagaagtagtgatatatatttaagcggagactatgttggtcacagagaccttaaccatttcagcttcaaagataatggcatcattcaccatatacccttttgatgcatcttttagctctgacatcaatatgatattgttcactcccacaccataatcgcttcgaatcgggtaccaagctgcagaatataattgtttgtggttggagcttcgttgattctttaaccgcagattaaccgctccccaagtgtttgtagcaactgcgtttggcttatggccttgagcatataggaagattgggatcgcttgtgatcttccatcaccagtaccttttgggttaaatcctaatctccaatatcggtcttcaacaagaaaatcatcagagtaatagaatttatcttccaagttagagaaatgaagtatcttccaagtgaaaacattgtttggagggttggatatgaatgtgactttctcttgtacttggaccgctgtgccgctgaagatctcagcaccaaaagaagcaatgtcctgctcaagataaccttcgttcgtgtcaaggaatgttgtaagaggaatcaattttccgtatccccactcttttttcgcatcattgtatcgtttcactattccatctttaacaatcaaatacttgcgttgcttcccattgtagacaa

SEQ ID NO: 592 - DNA, 861 bp, Arabidopsis thaliana
ccacgcgtccggggtttgaaaacaccgatatggcgttacactatggtactatgtttagagagtgcatccgtcatcagattgttgcaaaatatgttttggactcggagcacgtgaagaagtttttttactacatacagcttcccaatttcgacattgctgctgatgctgctgcaacttttaaggaacttctgacaaggcacaagtctacagttgctgagtttctcattaagaatgaagactggttttttgcagactacaactcaaagcttcttgaatcaactaattatattacccgacggcaagctattaagttgttgggcgatatattattggataggtcaaattcggctgtgatgacgaagtatgtgagctcgatggataacttgaggattctgatgaatcttctcagagaatcaagcaagactattcagatagaagctttccatgttttcaagctgtttgtagcgaaccaaaacaagccttcagacatcgccaacattctggtggcaaacagaaacaagcttctgagattgttggctgatatcaagccggacaaagaggacgagaggtttgacgcagacaaagctcaggttgtgagagagattgcaaaccttaagctgcgagagcttgcttgagcatgcacatatacacagaagctcatgatttctgttaatctttgaaagacatttttggaccatcaaagattgttgttatttattaggtactgtttcttttctctctctcagcatctacgctgttgactactctggatttttttagatcatatgaattcacatgtacactcctttagtgttgatcaaataaaaatggcattataaatcctaaaaaaaaaaaaaaaaa

SEQ ID NO: 593 - DNA, 861 bp, Arabidopsis thaliana
  misc_feature (1)...(861): n = A,T,C or G
ccacgcgtccgcgggcttactcgagagcaggtccgttgtttgataggcaaggggatagtgtggttggtattcctcatcctttgcgggccttggcagctgcaagcagaggaagaagcagacttatggtgtcccagatgcagaatgtcttggatgtcatgcgtagggatgctaataataacaacttgcggcttgaggacgttatgcttctaaatcactcagtactatttgatggggctactggtcatgaccggtatagagacatgcgacttgatgtggacaacatgtcatatgaggaattgttggcactagaagagcggattggagatgtttgtaccggtgtaaacgaggaaaccatatcaaaccggttaaagcaacgaaaatacaaaagcaacacaaaatctccacaagatgcagagccatgctgtgtttgtcaggaggaatacaccgaaggagaagacatggggacactagaatgtgggcatgaattccatagccaatgcattgaagaatggctgaaacagaagaatctttgcccaatctgcaagactacaggcttgaacaccgcgaagaagcggaggatagcatgatgatttctcgaaagagcttttttttttcttaactattcaattttataatcaaaaatgaaagaaacagaaggtaccctcaagcccccacaccattgcagagccaggcaagtttgnccccaatttttttttaaaaaaagatagaatttgttnnnatttataatctgagtatgaaagatggaaagatttggattgaagggaaaagataaagggtggtagggaaatgttgtttttttcttttatggatttgtttggataatttaattttacccattgt

SEQ ID NO: 594 - DNA, 861 bp, Arabidopsis thaliana
agttgattctctctatctctctcacgagtcacgatcctactcttcttgatatggctgaggttttgcgtcccgagatgttagatatctctaacgacacttcttcattagcatcaccgaaacttcttcatgttcttgctgttgatgatagtatggttgatcggaagttcatcgagcggttactcagagtctcatcttgtaaagttactgttgtcgatagtgcgacaagagctttacaatatcttggattagatggagagaataatagttcggttggatttgaggatctgaagattaatttgataatgacggattactctatgcctgggatgactggatatgaactactgaagaagatcaaagaatcatcagctttcagagaaataccagttgtgattatgtcttcagagaacatcttgcctcgtatcgatagatgtcttgaagaaggagctgaagatttcttattgaagcctgtgaaattagctgatgtgaagagattaagagattctttaatgaaagctgaggaaagagcttttaagaatattatgcacaagagagagcttgaagctaatgatatctactcgcagctaaaacgcgcaaagatctgagtttatcagattccacgtacgatatgttctttaaaagctcaaagattcacacacatgcatgtcctgattctttcggcttacaatttttgagacattacggcttcttttgctgatagaaccaagactgatcaagagtgacaaagatgggtttttataagatagaaatgtaaattgtagacttggattcattagagaggagaagagatacattttttttttctttacatgagagatatgtaaaatggtggtgtgttat

SEQ ID NO: 595 - DNA, 861 bp, Arabidopsis thaliana
gcccttttttttttttttttttctctaaagtaatgttcaataaaatatagtgagaacagataaggtacctctccccgtatataggatttttattttacatattacatccaacaaaatccaataagttagatcacaccgtccggtcatgtattttcttctttctcttgctgctgtgtagttaaaaagtctcacctcaatacaagtctttccaacgtaatgtatcaccagttccacggtctggtttgtgatttagctgcaagatgtagcgccattgaaccactgctactgcttggaccgttgcagataccaagcctgatgatgaacgaagctgtgcagcctttctctaggccttcactttctatccacatgtatcctcccattagcccgacaaaccgtttacagagagctagcccgagtcctccaccggaatggttcctctgagttccggtccgaggctgtacaaatttggtaaagagcaaaggaatgtcttgtgtgtgaattccacaccctgtgtccttcacctgcacacataggtagaagtgactgtcactgagaactggaaaaaattctggagatggtaattcttgtaaggactcgggtttcatgatagaggctattatggagatgtagccttccttagtaaatttcacagcgttgcccatgatgttaagaattgtttgcatcagacgtttctcatcaccaatagcataagttggtaagtctgcagacagaatcagattcgttgatagtttcttcactgatgcgattggctttatcaaagagatgacctcttcaaagatcgcttgtagactgaatggttcattttccaagagtaagctcccatcttccaatctcgaaaga

SEQ ID NO: 596 - DNA, 860 bp, Arabidopsis thaliana
tttttcatagagagtcgcacatttcataacaccacggccgaaatcaaagcaaacgttacaaaagcccaaactagaaaatagatcaaaagtcaccctaatgatcacagaattaaaagaccaacaataacatcgaaactaattaattattccttaattaaaaccctaaccaacaaatactctctattaaggatgtggatcgatcacaccaccgaccacgccgtgtccaccaccgataccaccaccaacaccaataccaccagccttaccgagaccaccaactccacctaaaccacctccggctccgcctagaccacctaaaccgccaataccaccggctttaccaataccaccgccaacaccacctacaccgcctaaaccagctccacctagaccgccaacgccacctagaccaccaacaccccctccaacaccgcctagaccgccaacacctcctccgacaccgcctagaccgccaacaccgcctatactatgaaatccaccgattccagctgcaccgcctatgccaccatacttaccgatcccgccaagaccaccgatgagtggcatccctagacctcccacgccggcaacaccaccaactccggcgaatccaccgactccagcaactcctccgatgcattttttgtcgccgacgctctttggtggtaactgatcagctgcttttgcatgcatgggcattgttgttgtatcgtcatgtcccgtcgtctttccctcatcagactctcccggcacctgacgagcacgtgcacagacgaaggatatggcgagcaagacacaaacgactgacaaagctctcgacatttctctcttctctcttctctttttttttctagattata

SEQ ID NO: 597 - DNA, 860 bp, Arabidopsis thaliana
tcagctctgattcacttgcttcgctcccaatcccgacgtctctcttcctccaccttcacttcaggatatcatcaccggtcaatagcaggatcatggtcatcatcagtgaacccgaaggtcagattccaggttccatcccttagccagagaagctgggcatcatttggagcaaagactagagaggacgatgatgagcacaagatcagcatcggaccccaagagaagaaagaagagaaggatggaggtgtggtttactatggaccaatctcatcaaccataaagaaagtgaaactcctctcactctccacttgctgtctatcagtctctcttggcccggtcatcactttcatgacttccccgggactgaatgtgatcatgaaaggtgctgttgcctctactgtgatcttccttagcgcatccacaaccgctgctctccactggtttgttagtccctacgtgcacaagctgaggtggcagcctggttcagacacttttgaggtcgagatgatgacttggctcggcacatttagcgcaaagacactgaaattctcagacatacgttatccagacacgcaaagaccgtatgtgagcttcaaggctgatgggaatttctactttgtggatgcagatcattgccctaacaaggcattgttggctaggctcactcctccaaaggatgctcatgactctgctttcaagaacttgtaatccaaattcgtttcttttgttatactctttttttgggtgtggatttttgttgggtttgtaagctctttaagatacttggatacctcctccccttctcatcactaatacccaaaaaaatgcaaataagaaaagaccggtttgatccaaaaaaa

SEQ ID NO: 598 - DNA, 860 bp, Arabidopsis thaliana
ctttttttttttttttttttttttttttttttgaagttaaaatgtcttcttcggtttgatctcactactcggaaattcctctcaagtcttcaagatgagagaacatgaaaatgaaaaggtgaaaaggtttctaagaacatgaaaattagagatgagagaagacaactttaaggttcatatcatgcagcagaagaagtcttcaattcaaaccaaatcaagccggtactgctttaaaggtttagacacaatcaaccgcttccatcgccatcaaccacctatactgtctcttcttgcctcagtacagtactctatgtgttgccttcatctctagaacgagctagtggctgccaaagctgaatgatttgcctcctcactacaccggttagtccatcaatgccttgccgggtagagaatgtacaccaggtagaagttactgacagtagattgccttgtcgataagtgaaggtatgggcttgatttcagttccaagttcttgctctgtctgatacattttgaagcggtcctcataagttaccaaattcacagccaacccaaggtgtccaaatcgtcctgatctgcctaccctatgtagatacgactcagaagtcctaggaaaatcgaaatttatcaccacattcacagcttgaatgtcaatcccacgtgtaaacaaatcagtgcaaacaagatttctgcatgcaccattgcggaaatcatggaaaaccctgttccgatggtcttgaaccatctttgcatggatatagaagcatgagtaaccaagttctgtaattttcttggccaacagctcaacacgattaacagagttgcaaaagataatggattggtttatttggagctgcaat

SEQ ID NO: 599 - DNA, 860 bp, Arabidopsis thaliana
ccacgcgtccgcatttcttgttattatccacgaacgaagaaaaacctagaaaacagttgaagaaagaaaatcacaagagaagccatggccggaattggaccgattactcaggattgggaaccagttgtgatccgcaagagagctcctaacgctgcagctaagcgcgacgagaagactgtcaacgccgctcgtcgaagcggcgccgatattgagaccgttcgaaaattcaatgctggatcgaacaaggctgcatcaagcggcacctccttgaacacaaagaagctagatgatgatactgagaacttatctcatgatcgtgtgcccactgaattgaagaaagccatcatgcaagctagaggggagaagaagctgactcagtcccaacttgcccatctgatcaatgagaagccacaagtgatccaagaatacgagtctgggaaagcaattccgaatcaacagatcctttcaaagctggagagggcacttggtgctaaactccgtggaaagaagtagaagtgtagaacaaagctcttaaaggtaacaacaaaagctgatcgcagtttctctccagtccacatgctttaccatatcctaaaaactatatctatgtatggtttggtttaatggcgtagtagtttgttgcgaggaatctttcatgatgtaagaaaaacaaagctgtttggaaccttttgtcattataaataatctcttctctttctttttcgtcatgtctcgtaaactttatctgccacggatgtatgttcttaaagaaattgaagattgaaattgatcaattgccaataatgatctcttttgtctctgtatatgtattgattcaaacagaaatcatagtagaaaac

SEQ ID NO: 600 - DNA, 859 bp, Arabidopsis thaliana
  misc_feature (1)...(859): n = A,T,C or G
agtttaaactcttgttttttgactcttttcaatttcctaataacttgatgtcagaatcagaatctcataacaaaaaacaaaagagacaggtttgattgagattgaaagaggaagattaatgtaatgggaattgaagtgcagaagatatggcttggagaaagagaggatgcacatcttcacccgagaacacttctgactccaacttctccatgtgaggccatatctcgctcgcatattgccttgtaaatgccgtgagatagccaagtgttgataagcaccactgttctctctcaccgacttcnnnactcttctttnngtttccattctcgctgtccacgtccatcgcagatggcttgtcatcttcagcacctatagattttagatcctgcactgatctcactttagttggatctgggagccgttccttcagtacacctaagaaactttggaacagcaagagcagtaaaacctcggtctcagagagagctctgttaagaagagcctcttttgcctctagggactcccgaagagataactccgcttcccctgtcttctccactgttgattttaaacgcttcatcttcgctggattctcaccaagaacgggttcaccttccactagggaaagtttgctctcagcagcctccaactctactcgtgcattggctgaagctttctcagcaaccaaaacatttttcgtaatgtttgatatatctttcctcaaatcagagatacggttataagtcttgttaagagcattgccaagtatctcccatggctgatcagacacatgaaactgatcaacattttctggagagaacacccatctaacaattgcctgattagatactagtctata

SEQ ID NO: 601 - DNA, 859 bp, Arabidopsis thaliana
tatagatcctgttcctggattaacgaaaatgtgcaaaagctctatttgcctctgccattctatgagtctcttcctttttgcgtatggcatcgccactccctttggcagcatccactaattcggaacttaatttgaaagccatatttcgacccggacgttttcgggatgcccctaataaccaacgaatggcaagtgcttttccttgcgtggatcctatttcaatgggaacttgatgagttgacccgcctacacgtcttgcttttactgctatatcgggagttactccacgtattgcttgacgtaaaacagatagtggatttgtttctgtcttttgttgaatctttttcaaggctcgatagataatttgataagccaatgatttttttccgtgtttcagaatacggttaaccaacatgttaactaatcgattacgataaattggatcggattttgcagttttttcttctgcagtacctcggcgtgacatgagcgtgaaaggggttcaagaatctgttttctttttataagggctcaaatcttttattttggctttttgaccccatatttagaacgcccttgttgacgatcctttactccgacagcatctagggttcctcgaacaatgtgatatctcacaccgggtaaatccttaacccttccccctcttactaagactacagaatgttcttgtaaattatggccaataccaggtatataagcagtgatttcaaatcccgaggttaatcgtactctggcaactttacgtaaagcagagtttggttttttgggggtgatagtatacacccgagtacatgttcctcgtcgctgagggcatccccgaagcgctggggatttcgtg

SEQ ID NO: 602 - DNA, 859 bp, Arabidopsis thaliana
  misc_feature (1)...(859): n = A,T,C or G
ttgaaaggaagaaactaactttaaaacagcagagtacaaaatctcaaaattccaatctgagaactacaacaagaccttaaggcatgttgtgtggagcaacaagacaaatacttcccacatcatatagcctaattgttctgtatttcttcacttatattcttgactaaaagagggatttctatcagatcctaaatcacatctaatcccaataatcaaggctgctacattccatctctgtgtgatgtcgttctctagatatatcagatcacttacactgttttgatcggaaattctcagtggataataacgaagttaccagattctcgagccgtctagcgcctggaccaggcctgataacatcagtatcaccaataacagcacaagggtcactcccattctcatggcttccaatgcaccaaccgccaggtgttatcatcccaggacctctgttaaggagctcatcatcgatcttgtcaaggacaggatctnctcttctgaactttctagcaaacggggcattgctatttaccattttggtcatgtctgtaagagtgagatggtgtggatgctgcttaggcggattgtcccacgatatgaagtgcaggtcgctatttaccgttgtgttnntgaattcctcagcgttgcagagaacagtgtgaaaatannnnnntggagaagagagaaaattcgagtaatacattaagaccgtacgaggtagattatcccaaccccatatacaatagtcgacgaatggccgagataacgccatccaagcagagcctgtgaaaagcttgaatgctgttgggatgctccgtctttgcgtaacccaaaaaacatcagatttcttgttcaaatacag

SEQ ID NO: 603 - DNA, 859 bp, Arabidopsis thaliana
  misc_feature (1)...(859): n = A,T,C or G
gttcgaattattctaagcatttactcgaaatacatacttacaaaaccctaaacagcctcactacataaatgaggaacaaaagaatctccaaggnnnttaacccctaacatgaataattatttcttatataatctgccatttaaaatttcatgcagactacatatatatcaaacaagttttagtagatcgtcgtgtaaaaatgatacagtacagatccgggtagtccctccggtttatcggtttttttatccaatcaaaccggaatgttatcgatggagtatgcgtcaaagtcgaattcgccatcaaccggtgcaatcccttcctgcttaagaagtgcgctcataagatcttcttgattactatactgctcgtgaaacgccattgttgctgtatccgtagccactctctctgatttcaccctcactgaaccnccgtttccgtctgcataaacctgatggtgctgtaccattcccgatggtggctgctggtggtttcggncatgctcggtggctgcaactgtcgtgttgtgtcttgacatggacgaagaagagtaggcttctgaagcggaaaacgcancggatnntgagtcnnnntgtgagtcaaaggctattccaatattcctcagatcccaatcattctgtctggtggtgaacatgtcgtagctcggcgtagngaaacccgcttcggagctgttaacctcttcctggtaagaagtggctttccgaaccggtactgatatccctggtgcacttgccagcgggaanctgttcacgggaagttctggttggaagttgttataaggcatcgagcttgatgagtgttgtgttgtgagattagtgtaacttgtcggtaacactct

SEQ ID NO: 604 - DNA, 859 bp, Arabidopsis thaliana
acaaagaagctgcattgcaatgttgtgatgaagttgatccattggcaaagtctataggagctgtgaacactatactaaggagaaaaagtgacggaaagttgttgggttacaacacagattgtattggttccatttctgctattgaggatggcctacgaagttcaggtgatccaagcagtgtaccttcttcttcttcgccattggccagtaaaacagtggtggttattggtgctggtggagcaggcaaggctcttgcttatggtgcaaaagaaaagggggccaaagttgtaattgctaatcgaacttacgaacgagcactagaactcgcagaagcaataggaggcaaagcgttatctctgacagatttagataactatcacccagaagatggcatggttttggcaaacacaacatctatgggtatgcaaccaaatgttgaggagactccaatttctaaggatgcattgaagcactatgcactggtctttgatgcggtatacactccgagaatcaccagactgttgagggaagcagaagaaagtggagccataactgtctcagggtcagagatgtttgtcaggcaggcttacgagcagtttgagatcttcaccggtttacccgctccaaaggaactctactggcaaataatgtcaaagtactgagacatagcttaagtgtgtgtgtgtgtacttccatgaaaagtcgtcgattcaataaagctttagattgccatttgtatgttccgagaatgtccttttttgaggccataagccgaatgactggttctctctttgtatttatatatatgtataaactattaagcctaacattaatcttttttaagtttctttgaaaaaaa

SEQ ID NO: 605 - DNA, 859 bp, Arabidopsis thaliana
ttttttgaacaaatatgaagatacataacatacaaatgaggacaacaaaatgttacaaatgaattgaatcagtaaacacacagttaagaaaaaaagaagataaaaaaaaaacatttgtaaactgtaatcattacattacaataccaactatatacagtagcattataaatcaaacgatttttaaaaaatttggcaaaaaaatgaagcagaagtttcgatttaagaaacctctcaaacaaaaacaaaaaatgaagtggtggtttacttgttagaccactggaattctatctcaaggtttctgggaccacttttgctttctggtaacaaactatattcacctgcgactgctcccagcatcaccaccctatcgatttggatcgttactttcccaaaggaactctttcccattttgcttttgttcttgcatgaaatgtggagtttttgacctttgggagggctctcaaatgaccatgagaagctctcgtcccactctggattaggacctgtcgatatcaccttggtctgtctaggaggattgttgccgagtgttatcttgcagaacacactcgggttaccaacggattgcttcatgttgttaccacgtttgatagtgactaccagagtacctggcaaacactgcaagaggaattcagctttctcctggaaccgtggtggacctgattggattaggtactgaagtagggggatggcgtctgcagcagcaactgattgggccctggaaacttcggcaggacaggctgaccaagcttgtctgagaagaaacaatgcatccaaggcagcttcttgtgttgcttctgatcctgtcttgagggatgtaactagatgtggtatacttagt

SEQ ID NO: 606 - DNA, 858 bp, Arabidopsis thaliana
ctttttttttttttttttatttcatctatagctattgcccatgaacaagaaccaaaattaggccagatccacaacattttcacgtttattgttttcagattaaaaaaacaaaatctaagtatcaaattcaacaaatgaatcatatagaaagatttacccaggcgagggaatggtagatcggaatcgcatttacacgcgagcggcgataacagcaggcgcggctgaagaggcggcaccaccgaggaaagagaggaatccggtagcagcaggctcttgctcatcaaggaaaagatcttccggagctctaaaagcaccatgagcacagatcaacgcaacaccaatcatcatagccgaaaccagaacagatccaacatcggtgaggaagatcacaaagatactgaacaaaatcaaacaccctaacgtctcacgatcggagaatgtacgaccgaatagaacgatcggctgatccgtgggacggaacaagtagaggaagagccacgacgcgaggagacagaggaggaagacgagagagaaaggatgagtgacgagagagaatccgacgatcgctgtagcgacggtgaggtaattaaccttgaaatacgagtaattcttgcggatacgaacagcagcgtcggagatcgactcaggtttggataatgcggaacgatccgcgagctcagcccaaggacgacgcttagagagaccgtttttaacggtttcggtgatctgattgatgaaattgcggaaagctggagtagcgatcggtggttgagattcgacggaggaaggagcggcggatggaacggtttggggattggagattgggaggactggtggtgctgaggaagccattggaga

SEQ ID NO: 607 - DNA, 858 bp, Arabidopsis thaliana
ccacgcgtccggcaaaacttgatccaaccaggacatggattatctcggaagaggatcaatggtggaatcaatggaggcctcatcaatgagatttcactagaatctttggagtatcgaagggatttactttttccattttctctcttattgaacaacactcgacctgttgggcgtcaggatactcttctccgttttatttccatccttctccttgctgatctttcagttacgctacttgcattacttcagttctattggcttgcccttgcagcctttcttgctatcctcctgattctccctctctcccttctttgcccattccctgccggccttaacgctttattaagtaaagaaatgagaagagcctcacttactcgtatctacggcctgtggaatgctacatctctaacaaacgtcattgtggctttcatttgcggtgtcattcattccgggtttttcactgacgagctaccaaacatctggaacgccataagggatgatgataaatggtgggtattaccaacaatcctcttgttactcaagtcaatacaagctcggttccttgattggcacgtcgcaaatctagaagtaccagacttttctcttctttgtccagatccagataccttctgggcatatgaatctggagcttgaccatcaacatgattataaagaaagaccagcaaaagatatatcttatttttcatgtaaatcttttaaaagtacaaagttcttctcggtgatagttgttaaaaacagttctctagaacatctggttatatatctggtgctgaattaggagttcgccagatcaatggtagttgtagaaactagagcgatagtatgtaatgcttaatg

SEQ ID NO: 608 - DNA, 858 bp, Arabidopsis thaliana
cttttttttttttttttttttttaccgaatggtcatggctgcttcttggcattagtgattcattgtttgtgcaaatattttataaagccaacaatagtatgtaaaatagcctcacagcaaaatctaatttgctttggctgtggagaaagagagagagagtcttaatacgtctcatggctgattcttggagtgtctctcagtaaagttctttagcctggaaaacccttctatgagaagctcaagctcaactgcaaaggtgatacgtagccagttcttaagcccaacagcttgacctggtaggatgatcatagattcctctttagccagcttggagcagaagtccaaatcatcactgatatcttcgagtagtgaaaagtttaacttcaccatcgtgaacattgagccctcgggtttgcaggggcaagtgatgcaaggaatcttcataagctcctcataacaaatctctgcacattttttcaccatttcaagttttgatgagaagaactcttcctttgtattcccaatgatatcaggcattgctccctgaataaacgttgcaggatccgtcgacatgttgacaacattgataagagtctgaacaaacccagaatctttcatgatgccatgagggtcaagagtcaccatccaaccaagtctccatccaggaacaaaccatcttttagatatagcacctaagacaataacaggcactagctctgcaaactctgccatggacacaaatggtttatccccaaaggcaaaatggtcatagacttcgtctgcgatcacaagtataccaagcttgcaagccgtctctgcaatcttttgaagatgttggcgagagaaaacattcccaca

SEQ ID NO: 609 - DNA, 857 bp, Arabidopsis thaliana
tgaataccccttcgttgaacaatttagcttcgacgtttcagaacgagtatgttgggggaagttatggtaactatggtaactatgagcaagaagtatcctcttcttatcaagaagatccaaatgagatcgatgctctcttgagcgcagatgaagattatgaagagaatgatgataatgaaggtgaagaggatggtggtgattcagaagaagtcagcactgctcgtacttcttccagggattatggaaacaccacagcagaatcttgttgttccagttatggttacaacaacaacaacaacaacaactcaaggaagcagagtttatcgggcagtgctagtagtagtaacaatgatgggaaaggacgtaaaaagatgaagaagatgatgggagtattgaggagaattgtccctggaggagaacagatgaatacagcttgcgttcttgatgaagctgttcagtatctcaagtcacttaaaatcgaagctcagaaacttggcgttggacatttctcaaaccaatcttgaatgctaccgatatttggttcttccatcactattgtttctcgggaggtaaatcatcggtctagcgctatctggacctttctctttattttcctccctctatactcacttccttttgttggcaggatggtatctattttatgtttgaatctctctatgtattttgctttttgtgtgttactgcttcgatgaagaagcaaggtttgaacaagtacttgtggatttgatttgagattttaatttgtatggttttactttcactgtaatcatttgactatgaactacaattatcattatgtatttgcttctacatagttttaaaaaaaaaaaaaaaaa

SEQ ID NO: 610 - DNA, 857 bp, Arabidopsis thaliana
  misc_feature (1)...(857): n = A,T,C or G
agacaggcaccgggatatcaacagcagcaatcttggtctcagcaatcggggtggtcaagtccttcaggtcatcagcaatcatggactaatcagacagctggccagcagcaaccttgggctaatcagacgcctggtcagcagcaacagtgggctaatcaaacgcctggtcagcagcaacaattggctaatcagatgcctggccagcagcaacagtgggctaatcaaacgcctggccagcagcaacaatgggctaatcagaataatggtcaccagcaaccgtgggctaatcagaacactggtcatcagcaatcatgggctaatcagactcctagccagcagcaaccatgggctaatcagacaaccggccagcaacaagggtggggaaatcagacaaccggccagcaacagcagtgggctaaccagacagctggccagcagtcagggtggacagcgcagcaacagtggtctaatcagacagctagccancagcagtcacagtggttaaatcccgtgccaggagaggtggctaatcagacaccgtggtcaaactctgtggacagtcatcttcctcaacaacaggagccagggtcctcccatgagtgccaagagacacaagaaaaaaaggtagtggagttgaggaactagtttgacaaactcgctatttcttctgcaccaccattctcctcatagttaatttggcttttgctttgtggttcctattttttgcaaactctagtagttatttctttaggatcaacatcataatctactacgttcgttgcccttgcttcttcacttgtatgtatggttcttttgaagccaatggcttctaaagagtaatggaattgaaaatcagt

SEQ ID NO: 611 - DNA, 857 bp, Arabidopsis thaliana
ccacgcgtccgtagaaatattttcaaaagttttgtcctttttcttctgggtttgtttgattctccatgaaatagaaaacagattaggtgatcatactcaagctatatcgaaaatctgaaaatctgattattttcattatgtgtttgatcatatcatatcatcatgatctcagattacttttgattgattcagtcgcaagtctcatgttttgatcatagctgagaacaggaaaaagaagaaaatggcgtttgtgacaactgcggaagtttgtgacgcgaatcaagagctgattcggagtggtcagctacgagctttgcaacccattttccagatttatggccgtcgacaaatattctcaggaccagttgtcactgtcaaagtttttgaagacaatggcttaatccgtcaattcatcgaggagaaaggaaacggtagagttcttgtggtggatggtggagggagtcaacgatgtgcaatactcggaggtaaccccgttgttcaagctcagaacaacggatgggcaggaatcgttgtgaacggatgcatcagagacgtcgatgagatcaacggttgtgatatcggagtgagagctttggcctctcatccgataaaagcgagtaagaaaggacttggagaacaacgagttccggtaaatatcgcagggactcggatttgtgatggtgaatggctttatgcagatactgatgggattcttgtctcccaaattgagttatccgtttaataaaaaaggctttgatcagttaccaaaaaaaaaaacagaacgtggtttgtgttcatcttcttgttacttaagagattgttgaattataatggaaaataaatttttgttttgaatc

SEQ ID NO: 612 - DNA, 856 bp, Arabidopsis thaliana
  misc_feature (1)...(856): n = A,T,C or G
tttctagaaccttaagctctttaagacaagagaaaacacagaagttccatttttacaggaactctttagtacatattttgcaagnnntcttttcagtacactactctaacaggttcttggctctatacatgatgcttcacatacttaagatattaacctatatatactaattaaacatcactattcctattagtttgatgacgatgatgaagtacttgttgttgttccttgaggctgtggtaaatcggttctcctcctttttcggcatgaattgaccggagcatcatactttcctgcatccaaaggaaagttgagaacagcttttcttcccctgagcttaaaagctgcatagtcataagcccttgcagcatcaatatcactctcaaaagtgcctaaccaaatcctggatcctttctttgccggatctcgaatctctgctgcaaatttcccccatggcctccttctcacgcctctgtaatgtctcgtttcttcaaacctctttgtttttttccgatttgagacagtctcaacctcaggtgatgttgttgttgatgatgatgatgattctgcttccctttgcagaatctcttggacataggaatctggatcangaacaggtgaactaggttccagtttcggaactgggttaaagggttctagagaccagagtccggagacaaaagcagtatcatcaaagacaaaatcttcaatgaaaccatcagggatcatcaagtcttcaaatagatgtttctgtataacatccaaatcagagctttcctcaaaagtctccatttcttcctctctcttttttctttagacaagacaggagaagaagaaaaactgcacggacgcgtgg

SEQ ID NO: 613 - DNA, 856 bp, Arabidopsis thaliana
  misc_feature (1)...(856): n = A,T,C or G
ccacgcgtccgacagaacctaatcttcttctccaatcaatctcagagaaaaaaagaaatggcaacaaaccctaaagtctacttcgacatgaccgtcggtggcaaatccgccggtcgtatcgtgatggagctttacgccgacacaacaccagaaaccgccgagaatttcagagcactctgtaccggagagagaggaatcggtaaacaaggtaagccattacactacaaaggatcaagctttcaccgagtgattccgaaattcatgtgtcaaggaggtgatttcacagccgggaatggtaccggaggtgaatctatctatggatcgaagttcaaagacgagaactttatcaagaaacatacaggaccaggtattttgtctatggctaacgctggtgcgaacacgaatggatctcagttttttatttgtactgagaagacttcgtggctcgatgggaaacatgttgtgtttggtcaagttgttgagggattgaatgttgttagagatattgagaaggttggatctgactctggaagaacttctaagcctgttgtcattgctgattgtggtcagatttcttagatctgtctgagattgttgatgatgatgatgatgatcttggggncccaatggtagctttgtgttgtttncctttgatgttttctggtttatgtttttggattttgatatttattgctgttgtgaaactttnnntttggctcccattgaataagaagaannnnaataaaattntnnnntccaaaaaaaaaaaaaaaaaaaaaaaaaaaaaaaaaaaaaaaaaaaaaaaaaaaaaaaaaaaaaaaaaaaaaaaaaaaaaaaaagggcggccgctctagag

SEQ ID NO: 614 - DNA, 855 bp, Arabidopsis thaliana
acaaataacaaggcttctctatttctaacagtagttaaatagaaaaattcttttttcgaaatgtaaagaaatataaaactccctgatatccacatgattttcccaaacccccccaacaaaatacagataaagaacatagaaaaactctatcggatatatgtgtttatataatcaatccttcttcttcttttttttgttctgcttcgctctgctctgcttccggatgatgtatagattcttcacctctgttgtttaatcatttcacagaagcttccattcagaaatctcctttccggaaggagaaggtggcgtcaagacgtaacagagaatcgacctcccgaccatagaaatggcagaaacgatgccagcgacatagaaaaccaaaatcagagcaagaacccaaggcatcaagagaaacccgatgaagaaagtcacagatccacatagcataagagccacagatataccaagcagcaacgacgcgaatccagacggagaaatatgagccaaagaaggcgaagaagacgaaaaacgatgcgaagaaaagggaggacgaattctagcgggcggatcggggaaatgatcaggtaaagaaatcggcataggaggagaacggagaagattcaaaacaagagatgatagatcgtagaaaaccctagattgttgttcatctcgttgccttctcatcatcaccacacaaaccaaaagaaaacaccaatctaatccaaaagaaaaattgcttgaggaagaagataactaaagggtttgctaaaaccgaggcgagaagataaaagaaagagccgcaaatttgattgggttagagggaagaaggtttaatggcgattgccaacaaaa

SEQ ID NO: 615 - DNA, 855 bp, Arabidopsis thaliana
  misc_feature (1)...(855): n = A,T,C or G
caaataaaacctgtattgttcatacaaatatctgcaacttgaggatgaggtttatttcctcatgagctcatttagtgatgtgtataagatgtcaattctatcaacatgaaaagaacaatctgactcctaaaaagccatcagctatctgttagctacaacaagcaatcagcagcacccgccgctcgtcctggtggttctccttgatgcggtagacacgcctaataacgaaatttccaatatcacacaaaaccttaaagacttttcctcccaaatgaaacacggcagcaagtctaatctctgcacccacttgtatgatcctttccataaaagtctcatactcacaggcagagagagcttgnnaactaaaagattctctcagaaaacggcaagcaacttgattacatgatcttattaggtagagccttaagtcggggttttgacttgaggagtgtttcgtcacttgtcctaatccactcagagagtctccatggcttttgccatttccatttgaattgaacaatccactggtgatgacttctcttccacctccaaagtctcccaccctgttttcctacggctgatagttttctcatcgatacttgtcccatcggtaccatcttcttgtttgtatcaagaaatgcagccggtcctctcacttttccgttagcaatccctggcgtaaatttgagctgtttctgtgctggcacggtcattggagaaggtgtgctcaagtcttcagctacatgtttcactgaactcggcggcgtacctaatgaagttgcaattgcttgctccctcaattttaattccttttctgcttctttccttctcaactcactctgcctcagaagacca

SEQ ID NO: 616 - DNA, 855 bp, Arabidopsis thaliana
agattcacataagagtgaatgtaacatgtactgtttagactgtaccaatggtcctctctgttctctctgcttatctttccacaaagaccatcacgccattcagataagaagatcatcatatcacgatgttataagagtgtcggagattcagaagtttctggacataacaggagttcagacatatgtgatcaacagtgctaaggttgtgttcttgaacgagagacctcagcctcgaccaggcaaaggtgtgatcaatacttgtgaagtctgttatcgaagcctcgttgattccttcagattctgctctcttggttgcaagatctctggaatatcgaagaagaagagaaaggaatggacgaacaatctttcggattctgatgattcgtatagcagtacgagtatcggaaggctcaagaagaatgatgacattatgaataatagtttcacaccatcaacaccgcctttatcagccgtgaatcgtcgaattgcaaagcgaaggaagggaatcccgcatcgtgctcctttcggaggactaatcatagaatactaagaaatggtaatgtatagtcttatgctaataaccatcactagtagtttcggggtacatatatgtatatatatatatatctataatggtatataaagcaatgtaaaataaaagcttaacatcatagtattgtgtagatattaaaggggtaaaaaatgttgggaagatgatagaatgaggcatgaaatgaatacttgtgcctgtatattttgagctcaatggacaaatatgtaaatgtagaatagtgttgtggacaagacaatagtgataagtatgtgatgaatgtgaatggaataaaggtcatttta

SEQ ID NO: 617 - DNA, 854 bp, Arabidopsis thaliana
gcggccgctgatgcaatacctgatggattacgaagacaaaaagttccagaatgtgtccaaggaaggactgaaggttgggaaagattcaaaagacaaggagctgaaggaagcattcaaggagctaacaaagtggtggaaaggaaatctcgctagcgaaaacgtagacgatgtcaaaatcagcaaccgtttggctgacactccatgtgtagtcgtaacatccaagtttggatggagtgctaatatggagaggatcatgcagtcccaaactctctcggatgctaataagcaagcttacatgcgcggaaagagagtcctcgagatcaacccacgacaccctatcatcaaagaactcaaggatagaattgcaagtgacccagaggatgagagtgtgaaggaaacagcacagctcatgtaccagacagctttgatcgagagtggattcttactcaccgacccaaaagactttgctgcccgtatttataactcagtcaagagcggtctgaacatcagccctgatgcagtagccgacgaggaagtcgaggcagcagaggaaccagagaccagtgaggcaactgagacgaaatcagatgacttggctggtggtctaaacattgaagccgaacccgttgagcaacaagaagagaacaccaaggacgaactgtagatatcacttctgatgcttctcctttgtgtttacctctttagtttaaagcagaacatcgttttactcgaatatcaagattagtttaattaagcagtttttgatggattatgtaaacgcactacttgcattctagagatcaaggaacctaaacttcttcttttcaaaaaaaaaaaaaaaaaaaaaaaaaaaa

SEQ ID NO: 618 - DNA, 854 bp, Arabidopsis thaliana
ttcttcgcggtctctctctctcagatctctccgaaacattcttcgtagtgaagcaaaatggggttgagtttcgccaagctgtttagcaggctttttgccaagaaggagatgcgaattctgatggttggtcttgatgctgctggtaagaccacaatcttgtacaagctcaagctcggagagattgtcaccaccatccctactattggtttcaatgtggaaactgtggaatacaagaacattagtttcaccgtgtgggatgtcgggggtcaggacaagatccgtcccttgtggagacactacttccagaacactcaaggtctaatctttgttgttgatagcaatgacagagacagagttgttgaggctcgagatgaactccacaggatgctgaatgaggacgagctgcgtgatgctgtgttgcttgtgtttgccaacaagcaagatcttccaaatgctatgaacgctgctgaaatcacagataagcttggccttcactccctccgtcagcgtcattggtatatccagagcacatgtgccacttcaggtgaagggctttatgaaggtctggactggctctccaacaacatcgctggcaaggcatgatgagggagaaattgcgttgcatcgagatgattctgtctgctgtgttgggatctctctctgtcttgatgcaagagagattataaatattatctgaacctttttgcttttttgggtatgtgaatgtttcttattgtgcaagtagatggtcttgtacctaaaaatttactagaagaacccttttaaatagctttcgtgtattgtgcctggattaatatgattgattgttttgctttctaaaaaaaaaaaaaaaa

SEQ ID NO: 619 - DNA, 853 bp, Arabidopsis thaliana
  misc_feature (1)...(853): n = A,T,C or G
gtgaagttcaacaatattctcaaacaaacaaacaatccacagattaaatatcatatcatatatgcccttctcttgaaatatcaaggcaatcattccgtgagagtagtggaagacaatgccatatattccacatccctgagcgactcaacgtctctgccttggaggcttttacattggaaatatgcaacggtgtaagtcacaagctgaaacatcctcaccgcaaagaccaaacacacaaggacaaaacctgtggtnnnnnnnnnngctaacgatcttcccatattgatcagctgcaagatttgagctaatccggatgccaataaaccaaagaaaagattcaagagaaacagttttgtcttcatccctttaacaatctttgctgctttccccaaagcttggaacccataactttcctctagtatcgatatgaccatagataagttccaatagatagcaaaataggactgagagacggtgaatataatcaataaaacaccagcctcgaccgccaagaaaccgatattttccacggaaccggattttatagagaacaaaaggataggacaaaggattataaagaagaggaagccaaagccaagactgaaaagagcaatgtagaaatatgtcacaagaggtcccttccaagatttaaggctcagaacaggaaaatctttgatattgaagttttcatctttaagagtaatagccgatgcgtggacgatgactagaacagaaaagaggttgatgatggaggagacagccgcgaaaatgtatgaagaacccacaaattggcgaaaatctgtaaagactctcataaggcgggctgcgtattccggggaggttggatctgtcg

SEQ ID NO: 620 - DNA, 852 bp, Arabidopsis thaliana
  misc_feature (1)...(852): n = A,T,C or G
atctcaaaacgtttttttaaatggttgcttgcagcttataacaaacgataagtttgnnngtgtggagcacagggttttggcaaatagaggtgaagaacctcgcatttcaagcgcatctttcttcatgcacaccataccaaatgagcaagtatatggacctatgnnngagcttctatcaaagcaaaaccctcccaagtacagaaacacaaccacgaccgnnntggcgagacattacttggctagaggactcgatgggacctcaccgttgctccatttcaggatctgaaagtaatggtggatccaaatctcagactcagaggatttctcagtagacactacacggctttcaaaaggaaatgactgaatgtcgcagatgtgatatagctgtgtccctttcagactcttctactgttccaagtctccttggaggaatgaaaccttgaccaccttcttctgaaagtgccttctctaatctctcttcgaaaggtgttgcatgccaactcactttctggtcctctttgtacttgtttgtagagtttggtatcccattaccatcccaccatttgggtgagatttgagaatgctctttctcattccaatgagcagcaaccattccaatgataggtctgtctccaggagttatggataaaggagaactactaatttcacctgtctgattttttccatctgaactctcttgcaacttttcctcacatattgttgatgtgggagattcattttctgtcttctctttgtaagcctgaactttagcttgttctaggttcgcatttgaatcttcgtggagcttacatagggaggcattcacaattagattggaagctgaatgcacaa

SEQ ID NO: 621 - DNA, 852 bp, Arabidopsis thaliana
  misc_feature (1)...(852): n = A,T,C or G
tccagaaatcttcttcttcctccgatcaccaccatgtgtacgttagagaaacgcggcgatctcttcctcctaaccctaaccggagacggcgaacacagattccaccccgacacaattgccaccattctctcccttctcgaacaagccaaatctcaatccacccgtggatccatcctcatcaccaccgccaacggcaaattcttctccaacggattcgatcttgcatgggctcaaaccgccggatccaaaaccggagccgcaaaccggcttcaccaaatggttgaatcattcaaaccggtggtagcagcgcttctcgatctccctatgccgacgatcgccgccttgaacggccacgccgccgccgcgggattgattttggctttgagccatgattacgtgttcatgaggaaagatcgtggggttctgtatatgagtgaagttgacatcgggctttcgatgccggattatttctcggcgttggttagggctaagatcgggacgagtgcggcgaggagagagctgttgttgagtgggaagaagattagaggagaagaagcggtgggtttggggattgttgactcggccgcgtatgatagtgaggaaggtgttgttgtggctagtgtgcnncttggtgagaaattggcggcgaagaaatggagcggtgaggtttatgcgtcgataaggaagagtttgtatccggagctttgtgggattcttggtttagagactaganngtttgcaacacctaagctctaagaaagcgnnnttcagagagtgaatctttggtttatttgaaaaacacatgttttgggagaaagagacaatgttaaactctagaactgtgatcacaga

SEQ ID NO: 622 - DNA, 852 bp, Arabidopsis thaliana
ttccacatgaacgaaaatgaaaattaatagtataatttaatacaacaagagaataagtgaacgtgatgatgatgatgatagcgataatcaaatgccgagataataaaaatcctacgaataatgaagagcttctgacgtggcacacaaacccaaattctcttacaaccaaaaaccaaaataatttaaaaaggcaaaagcactgactccaccctggctctctaaaccaattacatccacaaaccataacccaaaaccatcgagactcccaccaaaacgtaactcatcactcccttagacgcaccacttgcctttggtggaggaggaggagaagttgaacctgcaccaggtgtgggtgtggtgggtgtgggtgatccgccagacggaggtgattccggtgtggtaggagttcccggagttgaagaaggtggcgtgggagtggccggaggtccggcagaaccggctacgacattaacggctagcttcatgccgccactgcagtgaccaggtgtagaacagatgaaatagtttattcctacagtcttaagatcgattttggtgtctccatcggaatggttctcagtcgaggaggaggcgtcgcagccatcatatccggctttgtcaaccacatccaccgtgtgggaagaaccatacttgaactctagaatgtcaccaaccctgaaagtctttccggtagcccaacctgagtagtccacaccagtggtccattcaatagtgtaagtcacagctactgcgcccgggacaatggtcagaactaggagaagagcagttgcggcggctacagccatcttggacaaaccattcattgccatttttttgtttactgtagaagag

SEQ ID NO: 623 - DNA, 852 bp, Arabidopsis thaliana
ccacgcgtccgctcaacttagtctacatctgcgaatgcaacggcttacccgaagttgctgagtactggaaacaagtcatcaagatcaacgactaccagaaaacccgatttgttaaccgcattgtctcttcaatgtttaacacagtctccaacaaaaagattgcggttctcggcttcgctttcaagaaagacactggagacactagagagactccagccattgatgtctgcaaaggtctgttaggtgacaaggctcgtctcagcatctacgacccacaagtcactgaagagcagatccaaagagacttaaccatgaacaaattcgactgggaccacccacttcatctccagcccatgagccccaccactgtgaagcaagtctcagtcgcttgggacgcatacactgcaaccaaagacgcccacggtatctgcattttaaccgagtgggacgagttcaagaaacttgatttccagcggatctttgagaatatgcagaaaccggcttttgtttttgacggtagaaacgtggtcgacgctgataaactcagggagattgggtttattgtttactccattggtaagccattggaccagtggctcaaggacatgcctgctcttgcctaaacaacaaccaaacctcttccttagcttttttctccattttttccgaattctcatgagtttttccatatatctttaactacagtatgtttgatcaataattgtttcttttgttcttcctattatgaattcctacagagattttaggtttggttcttgttggtaattatgtaccttgggttatcaaatattgtaagcttttcgaatattactttcataatataaaagtttt

SEQ ID NO: 624 - DNA, 851 bp, Arabidopsis thaliana
  misc_feature (1)...(851): n = A,T,C or G
agcggccgcccttttttttttttttttaattcagggtttgctttatttcttcaattagtagaaacagatacaatatatataagggttgagttattcgacatgtacaactaaagaccaaagcagagccttttttgtcaatttaaactctgatgagacaaagacaaactcgtctttccatgaacataacgaaaaaataccatcacatcttcacggtctctgttttaacatttctgcatcttagtccaatcgttttgtcggcatccatggtgtcttcttggatccttcgcgtcccagacccttgcagcctggaccatcagtccactcaagcatgagctctacttccccacactccacattctttagtctaagaatcatctcttgcatgatcttcccattgctccaagtgatgctgctctcttcagctaaacagttggnnntgcctggacggatcctcttgattgcacaaccattggggagcttctggaaatctaactccatttgatgcgcttctaggaacggnntaaagtctatttctgcatcacccattttgtcatctcccgagaatctatctttatcaaacaccgtcagacggataggatcattcacatctttgatggaaagggtcagttgttcgttccacactggattacagttattattaatcacacgcgtcttcagtttctgattagccaatgtgataacaacataaggatcactggtggtggcatcacgaatagcaagattaatccctcttttgacatgaaccctgagaatccctaatggtttatcttccattggagaaacatcgacgctgattcaacgcggagttccaaaaacaaacatcgacagat

SEQ ID NO: 625 - DNA, 851 bp, Arabidopsis thaliana
ttttttttttttttttttatcttaaatctgaatgtgaactttaaaaagggcagcttacagatgaatttcaatctctacttacttgtaacagctgaaaataatctaaacccatcatcatcaatgatagattctgaaccaataaaccaaaaactcagatctcaagatatgttttaagggggtctctcacagttcatgtgaaatcgtttggcttcccaacattgatgctctcttctgctaaaaactctgtaatggccttcttttgccatcctttgaagctcttgtggtcaagatgagccaagatctcgcctccggggaatgatgctttagtagcttcaaatgctgccttaattgattgtctccaatttccaccaatgtaattctctccaggcgttgttttggtttgagttggatcttccatcggtaatgagtatccagaaagcaaatggcctacccaaatatcatctttcaaagctatatccatgtgacgaggagcataatgtccacctccaatgcctaaaagaactttcctctttccggtttcacttttccacttccctacttcttcactgcctcctagcccaagaccttcccacattaaaagagccatgacttgagctgcgtcttgcctcttccagtattcctcggtactaccaatctccaaaaacatcgttggcttgttagttattggtccatgatgagtagcttccaatgttatctcaaactcaggaactaaaccatgagcttcagccattttcttcaaaagacgaaaccatggaccaattctagtgcttggcaacgccgcccatccaggctttcctccttgcggcggtgattctccatcctttagatga

SEQ ID NO: 626 - DNA, 851 bp, Arabidopsis thaliana
ccacgcgtccgttctctctctcgccgacgacgaaaacatgggtgccaaggcgaagaaagctttgaagaagaacatgaagaaggttgctgcttcggcttcttcttctcagctacctcttccccagaacccgaaaccttcagctgattttttgccactagaaggaggtccagctcgaaaagctccagttaccaccccacctcttcagaataaagctactgtgctatacatcggtagaatccctcatggcttctatgagactgagattgaagctttcttctcgcagtttggaacagttaagagagttagagtcgccagaaacaaaaagactgggaaatcaaagcattttgggttcatacagtttgaggaccctgaggtggcggaaattgcagcgggtgcaatgaatgattatttgttgatggagcacatgcttaaagtccatgtcattgaaccagagaatgttaaacccaatctgtggagagggtttaaatgtaacttcaaaccagtggattcggttcagattgagcgaagacaacttaataaggaaaggacattggaagagcataggaaaatgttgcagaagatagttaaaaaggatcagaaaaggaggaagagaatcgaagccgctggaatagaatacgaatgccctgagcttgttggaaacacacagccagtcccgaagaggatcaagtttagtgaagaagactaaaagctgaagctgaacaacacttttccgataaccttttttgaatagaaatctgttctgttgtactcttgatattggatcaataactaaactttaaagtttgcaatgaaaacttctgtttcaatgaaaaaaaaaaaaaaaaaaaaag

SEQ ID NO: 627 - DNA, 851 bp, Arabidopsis thaliana
ctttttttttttttttgcagatccaaaactgtcggcactaaatcagataataagtgaacccaatgctgtaataaaattcctcaaaaaagtaaaataaaagggcaaaagaggaaataagaagataaatcgtgtcgcaatcttagcaaaacctataatcaccagagtcaatcgtagcgttcgcagccgccggaggaatagcaaaatgccataacctcccggcggcgttgactctatacttccggcataaaaactcctcggcaaaagtcttctccaccctccgattaacatcgtgcaagaacacgtgcgtaactcccggtttcttccggttcctagccataacagccgccgagaaaatcgccgccattcttcccggagcttctgcgaagtaacctttaggagcatcgaccatcagcagatcccactctgtatcgtagaactcatcgggcagtcccgtgagagctagcttacacttctcgtttccccggagataagatttcgccggaaaacacttaggctccgttttgtacgaacgtagaagcgaatcggcttgttgaagctgcgtcctgtaacgcacgtgatgcgcacgtaagaaaggagagtctttggtcactttctgaaaccattcaagatcttcttccaagaacaaggttttgccacgtggatttaaagaagcccacatgagcgagtcacgaccgagaccgaacacgagaaagttagccggagctagctttttcaagatgttgaaagagatcgagatctcagcaagattctgttgtgggacaacgttagatgtcgcgtagtggacgatcgcttgaagctgaatcggagtcgcttcgtaatcagctgccgca

SEQ ID NO: 628 - DNA, 850 bp, Arabidopsis thaliana
ccacgcgtccgcgacgacggcgatggcgatggctatggagatttctcttcctttcgttggatcatccatggccttaagcgcgggaaaatcaaggaacagcgtttctaggattagtcgtgttggattctcttcggtctcggctgtacatgtacccagaaggatgtttatgcagctgtctggatttggttcggtcttgacgcttctggattttcctagtttagcggcgccggttcctcagatgaaggaacctgaagtgatcagaatgcaggacattgaaactcccgagtggcgtgaggtatcaagagataattgaaggtgaaggacgagaagctcatgaaggggacctggtcgaactaaactatgtgtgtcggcgtgcaaatggatatttcgttcatagtttcttgattcagcacggtggatcaattcagtggtgaaagctctcctgtcaaacttattctcgatgaaaacgacgtaattgagggcttgaaagaagtcttggtgggcatgaaagctggagggaagcgtagggcactgatacctccatcagtagggtacataaacgagacattgaagccaatccccgaggagtttggaccacgacgcagccttctatcgcatgcgaacgagcctctggtctttgaaatccagctcttgaaagtattatgatatttgtcctgtcactgactgttaatgaagtattttggctgtgagattatttattttctattgtaaatctgtaacaacaactgcttggaactacatatcttgatgagttctgctttaaggcttggattaataagggaattaccataccagtatttttaaattcactcaagaagtttccaaaaaa

SEQ ID NO: 629 - DNA, 849 bp, Arabidopsis thaliana
  misc_feature (1)...(849): n = A,T,C or G
ttttttttttttgtgtaaaaactcaacatattgcacataggaacgaacgtaagacaatatgaatcccaatgtaatcttttcgtatatgggatacgacaaagatggtaaagagagacatatcagagagtgtaactaagtttacaacaactcaagcataccaaaagccatcattctacacaggaatatatataaatatccaatacttgacaggaaagctttctttattgtaggccttgtttatagatcctggtttcagaaagccagatatagagagaggaagctctctaagcagaggcattgaccatgaagttatcgacatattctttccttgcaggaagatggtcgtgtgggcgattgtatggtgtccataccggttcacccacgaaaagccgcattgccttgatatagttgtcagagtccacggtgaagcgatgatagatcccagcaggtaannntatcatagctnnnnnntttacccataccctaatccaagcttcattgcgatctctcacatcaaagtaaccacttcctgcaacgcagtaacggatctcttcatcagtatgcaaatgttcttcgaaaaagctctttactttcacttcatagtttggaagcttttccgggcatacctcacaaaagtccatgtaagagtaaccacgagattcacggatctttttcaaatcctcatcggtttcgtagttatcagcatcaagtctccagctaagtactcccagctctgcaagtttgcccaacgatacaaactctttaggatccttgtggtgaggaagtctctgatcctcttcactatcatccatataccaagcttgaatcacttcttctctcccatccttg

SEQ ID NO: 630 - DNA, 849 bp, Arabidopsis thaliana
tccgtaaaatcagtgactcttcgttcgtttcatctcccaattgagtttaacgacaccaagttcgtctcaccgccttgtttcctggcgagatccttcccggtggttcgttgttcaagcaccagagacgtacctaagcttgaactcttcagccgcggaaaattcgaccggattcttcaagatccgccacttattgaaaaagccgaatccgaactctcagattactgttcgacgcttgaaggtgatgactcttacagttgctggagagcttactttgaactcaaagatctcgaaagagagaagccaaaggttgaagttgagaatttgattttgcaaacaggtggtttgaaatcgttaatcgggtgtttacatggagttgcttcaatggagaaagataacaaaaccaagaatggtttacatgtaggagaagaatcagatagagagaaaggaatgaatttgcacattcatattcctgatggtttaccaaaatctgaacaagagttggaggaagaagagaaatcgaaaatgccggattcagctttcactagattgcttagaagtaaaggaactatccctgcttggttctctcacgctcctgaccacgaaaccgactgaaagcggattacggattacggtacctttagaaagttgttatcttatcacagttatatgtaaatatagttcttggttttgctttagttcatgtagtctatcttttgttaagatgtgatcatattgccatagaaatgtggttgttattacttgatgttcgccaatgttgaatttgtttaatgctgtgtgcctattatagtactacgcggttttggtttaaaaaaaaaaaaaaaaaaaaaa

SEQ ID NO: 631 - DNA, 848 bp, Arabidopsis thaliana
  misc_feature (1)...(848): n = A,T,C or G
ggcacatctataacaaaaaaaaatgccgaacaaagtttacgataccgaaagagataaaacaaatagcataaaagcgacccccatcctcatgccactttggaaggtcacaacgacctaagtaccaccaatccttgcttcgccctcagctgtcgtcatcgatgcctcgtcctcaaactctggaaaggccacgaggtcatcatcaagaagatcggtaatctcaagagcatcgaccacttcgcgccaattgtttttgtcaaccttaagctcgcacatagtctcccttaggattgcggtaccgtttttgatcaatttcttcaagagtttccgagaacctacggcttggcattgcatgaaaagagattcgtctgcaacacgtttgtcaagcatatgcttctttagccgatcgatcctggctttataaatagcaacatcatctttaaagcggctccattcggaacgagcagtacgaagagcatcgtcaagggaacttctcaaccttgattgctcagctcgactaaaattatccgactttttgagactttccaagagctctgtgagttcaagttacacaaacgagttgctgcaataaattccgcnntctttcgtttttctgaacnnncaccgtttcctccctcacctctctcgcctgttcctcgagaaaattgtataatgcatttccggtggtaatcgactgaacctccttacaagcccaaatttggtagagatnntttgctataggggattcaacgggaggnnnctcacgagacgacccgataacttttctagcaaactcgccgcaataacttctgctgtctggaaatggataaccttttctatcataattgaaa

SEQ ID NO: 632 - DNA, 848 bp, Arabidopsis thaliana
cttacctgtctttagtcaactttgaacaaaaaataatatggattatacaagaagacgaatacatgagactatggagctcaaatgcacactgaagatcatcagttattgttccttttttattacagaagacaaatcaaagaagataaaaagatcttccctttagaaaaaaacagaactgtagtaatgaatataaaggaagggtgatgatcatttcttgggttggaacttggatttgatgtgtttaacagttcctggagaagtctgaaaggcttgagccaagatgttgtcaggaacaggaggagtagaaccaaacaaagtagcaccaagagattgagttccaggaagctgactattgaaagctgcaataacagaagcagggacatcaccattgttcttctggaaatggacaagtcctttggggaaagcaaagacatctcctttcttgagagattgagagattagcttattggcagtagtgagaaacccaacgtcaagtgttccttcgaggacgaaaacgacctcagtggcacgtgggtgggtgtgaggtgggtttaagcctcctggtgcgtagtcgatacgagagagggagacaccaagtgtgttgagtcctgggattgtcataacgttagctcctgtgactaaggcaccgaatgtgttgttggtaagacctggtttagctaatccttgtgagaagaaatcggctgatgtgactgtagctgcgtctttgcaagggaagccattgattttgattccagagggaagatcagcgacgcagagatcttgaagcatgtcaggatctgcggaggaggagatgaagaaggagacggtggtgaggaggaggaggagag

SEQ ID NO: 633 - DNA, 848 bp, Arabidopsis thaliana
gagcggccgcccgggcaggtgcgtctctctcccgcaaccttcgattttcgtttattcgcatccatcggagagagaaaacaatcaataagcgaccatgttggtgtaccaagatcttctcaccggtgatgagcttctgtctgactctttcccttacaaggagattgagaatggaatcctctgggaagtagaaggaaagtgggttactgtgggagctgtagatgttaacattggtgccaatccatctgctgaagaaggtggtgaggatgaaggtgttgatgactctactcaaaaggttgttgacattgtcgacaccttcagacttcaggagcaaccaacttatgacaagaagggattcatcgcttacattaagaaatacattaagcttttgacacccaagctcagcgaagaagatcaagctgtcttcaagaagggtattgagggagctaccaagtttttgctccccaggctcagtgacttccaattctttgttggggagggtatgcatgatgacagcactttggtctttgcttactacaaggagggttcaactaacccaacatttttgtacttcgctcatggtttgaaggaggtcaagtgctgagagagaagctctcgttgggttactgtggtcggtcgcagcgactctctaagtttatgtttctttatattgtcctgtgtttcgtcgtcgtcccctattaaaattacctgccagtttacttttctctcttcttgttttctgtgttggaagattctcaagttatttattccgcaaaaaacggtttatcatttacaattagttgaattttggtcgttactttttgtgttaaaaaaaaaaaaaaaaaaaaaaa

SEQ ID NO: 634 - DNA, 847 bp, Arabidopsis thaliana
tttttttttgaaatgaattatgaagtattttaattttaatacagattaatttatgcataatatgaaaaatgataagttaagataaagtagaaactttaaagagagaaaaaaaaacacaagcagtgttgaatacgagaaaaactcttgtcccaaagactaaacccctttgaaatgatttcaatgcttggaagcaaagtcattgatcaaagccaaggcattgctcgtctcttccgcaacactcacaatgtgtgttctgattaaacttttcagctccccagccatggccttccctccaaacccatccatacacgcggtctcatctgtcagtgctgcgcttgtccacgtccggacattgctcagacagaaccaaaagtcttctccgctgtcaccttcctccagatgcttcagttccttcagcgaattgctcaacctgtcaacagtgtctcccatctcctctagacagtccgctacagcctcgtgctgcctctttgtgattcctttataatcagtcatctctgatacataggttttggctgactttgctcgggctatgctaacggcaagcgcggtctcagcaagcttacgtggctgcttcttgatctcgcttgcatatgaagacagagactggaagcatcggtctgggtacgacgtcgtctcacaagaggctttaatgaactctgtatcaccacttgattcctcttcaaggtttctagccatgactattgctgcagtggacagatacagaacaaagagaatcaaagaaagctcgaaatttctagccattttagatttaaaacacaaatggcggaaacctgtgatgagtgttatgtttccgccgatggcaagg

SEQ ID NO: 635 - DNA, 847 bp, Arabidopsis thaliana
tttattctcaatggttcgttttgcaaattgttaaaaatattatttttcacaagaaagttctaaatgtttaggagtgatttcagacgaaaacataaaacggtttaagtttttttttaaggaactacggaccagagctggtagtagggggcttcttgaactcgatcttgtcgactttaacttctccatcgattagctcatagacatagactacagctcggaaaccatcgatgtccataaggacaaagcttgggttaacgtcttggtttatgctgctgtaagctccggttgcagagcccgggtttatcaccactcctccctcgtgtttgtacgctgtgaactggtgggtatggcctgttacgagaatgtcgacgcccagttgtctctgaagcatggcgagtgagtctagatcaccccatgggatcacctggtggccatgacacaatcccagcttgaattgcccaatagtcaaggttttattctcagggtatcgcgcatcttcgtcaaactcccctcgaactatatgcaaatcagggcagatagtcttcaagtagtcatggatttctttgatgcagagatttccagtgcagatgatgtgttgaatcttcccaggaacaagcattgatttgaacttaggaggtagatcagccgctctatggggtacatggagatcccccaatgccaataccagcaccatttcaaaactttcaccaaataaaaaaccagatcaagggctcaaatagactatcgaataagattcctgatttcaaggaatttgatgtttttgttcttgcggatcttctcagcgatcgcccatggaagatcctttgttttcccttttcttctctct

SEQ ID NO: 636 - DNA, 846 bp, Arabidopsis thaliana
  misc_feature (1)...(846): n = A,T,C or G
ccacgcgtccgagcgaatctcgaagaaagagattgaaactaaactgttgaaattttccgacaataaacttatctcttttcctcattcaatcctagagaccaaaaagcttaaaagcaaaaaagaacacaaggaaatttactcagaggtaatcgtcgtcggagccaggaggaagaggagggatgggagaggtctggacatggattatttcattcttaatccttatcactcttctcggactcatcgtctatcagcttattagtttggctgatctcgagtttgattatatcaacccttacgactctgcatcaagaataaactttgtggtattaccagaatccattcttcaaggatttttatgcgtattttacctcgtaacgggtcattggttcatggcactcctttgcgttccttatctctactacaatttccatctgtactctcgaaaacaacatttgatagacgtgacagagatcttcaacttgcttgattgggaaaagaagaaacgactcttcaagctcgcttacattatcctcactctctttctcaccattttctngttaatctattcaacacttgatgattacgaggactgaatcacgcttgaagatacacccctgtgacaggcgacaacaaacggtttggtcaaacccctctcttagtacttgacaccgcgcttgatacaatggcatgagaaggaaggcttttaggttatgtaagttaattaatgtggcattagagagctgtgtaaaccagattttatagtcattagaatttcattgtggatctttgtggtgaagccaagcagtgaattgttaaccatgattggaaccctctaactaaaaaaaa

SEQ ID NO: 637 - DNA, 846 bp, Arabidopsis thaliana
  misc_feature (1)...(846): n = A,T,C or G
tttttttttatcaggaggtcattgcaataaacaaaaacattacagtttttacatttggtaagacccaaaaaaatagctttgttgcaaagatcttactctaggtttttagaaaagatgaagagatattttgagtttattctgtttccactttggaagtgcatagaactcagatttcgccattccaaatctctcttcaaactctttctctgttaagtacgcctctcttcttgttgcatctatatccgtcactggcttctgagaatcaactctgagctgttcatatgaatatgcaagtgactctagactactaagatcgctattgattccaacgcgtggcttctgtttagaaatgtccgacttggaactcgactcttgtctcgccactccatcattaggatccactaaaagagattctgagaaaagctttttgacaactggagttgagttactgctgtttgtcatgtcttctgcagagctcaaactcaaaagcttttcgctggagcaaggtgatactcctcgctccgatccgtttgagctcacagatcgactttgtaaatcacgtgatgcattatcctttgactgtgatctatactggcttccactagatctcttagtgcttgtcttctttcctttcaaactagcaagcttcctttcaaatgaattaccatgcatgtttgccttttcaggaacccactcaaagaaacgggtgaaaaatggtggctcgtggccttctgtgacaacatatacaggagtccnnntggttagaccttcttccagtatatccatctctaggaatttcagaccaagagtaagagcttcttccttcgactttatgtttgagtttga

SEQ ID NO: 638 - DNA, 846 bp, Arabidopsis thaliana
tatcaaaagagaagttcttttttcttttaaaactgtagtgaggtccatgaatagtagtaagtaaaggtaccaaattcttactctacgtttacacgattatcaaaacagaaatcaaaagcgaaataaatttaaagaaacgacgctcttgcaattttgttataaacccactaccagccgcagtggctgctactcagattctgcatttgctcaagctgaagttgtcttggtggtggttgcagctgcggaggagccttccttctggtcaccaaagacacgttgacggaaatctttgaccatgagaggcagtccctgacgaagagagacctttggttcccaacctaaaagctctttggcctttgtgatgtcaggctttctcttgtgagggtcgtcttctgtgtttggtctgaactctatgtttgcattcggatcaattgtctcttggaccaccttagcgagctcgagcatcgtgaattcaccagggttaccgaggttgaatgggccgacatgttctccttccatcagtctcatcaaaccttcaaccagatcagaaacaaattggaaactccttgtctgcttcccatcaccgtaaacagtcaatggctctttccttagtgcctgtgcaacgaagttactaacaacacgcccatcatctatacacattcttggaccataggtgttgaagatcctagcaattctgacctcaacattggcacctcggtgatagtccatggtcaacgtctctgccgtacgttttccttcatcgtagcaactacgaacaccaatgggattaacgttgccccagtaagtctcaacctgaggatgctgcagaggatcaccataaacctc

SEQ ID NO: 639 - DNA, 846 bp, Arabidopsis thaliana
tcgagcggccgcccgggcaggtgagacgaggatcaatcaccattctcatggcttcagcttctttctctgcggtttcttcgctctcgtatcaattccgttcaaaagaagcgatcttttcatcgaaagcttcctgttttagctcgacggctttatcaggaaggagagtgtttggatctatcaaagcagctcaagtgacaagccatgagaatcctagaagacgaactcagaacgtcgaaggagatatatttgttgacaatacttgtattgattgtgatacatgtcgttggatggttccggatttattcactcgagtggacaacatgtctgcggttacaaagcaaccaacttgtaaggaggaaagactgaatgctcttcaggccttactatcttgtccgacgggctctattcgcactcaaactccacctgctgacataggggaagctcaagagacctttccacttgtagtggacaaagacacacttcctggcgtttttcattgtggatttcattccaagaaatcgtatggagcaacttcttacctgatccttcatcgtgagggaaatatacttgttgatagtcctaggtacgtggagaaacttgctggaaagatcgagatgaagggtggtgttcgctacatgtttttgacacacagggatgatgttgcagatcacaagaaatgggcagacagattcaagtctaccagaattctgcattctgatgatgttgaaccttcgacctctgatgtggagttaaagctggaaggaagtggaccatggagtatctatgaagatgtcgaacttatacacactcctggtcattcagaaggatcagtgtgcatgttccata

SEQ ID NO: 640 - DNA, 846 bp, Arabidopsis thaliana
ttttttttttttttttttttaacttaaaaaacatattttattaattacatgtaacagaaccactattgtatatgaactcggataattacaacagattttaaaaaaaaaactgtgactgtaacttgataagtgatagccacaacatttattgaattttctttacattgtcaaagatacaaagactgaagaaaaggtagagaatgtgcaaagcttctggatgagaaagagggtttgcatcagtctaaagagagcttagccagagtgagggagagtacttttactccattagccatgtcttcaggagatgagtattcttcaggtttatggctgtatcctttgtagcacggaatgaatatcatacccatcggagatatcctggccatgaagagagaatcatgataagctcggctgatcatcatcttgtgtgataagttaagttctgtggctgcctctgccattttcttgattactagtttgtcagagagtgctggtggatcttgatttacaatcttgaattctgatagcttcacttttcgttttttagctatcgtgttagcagattcctgaattttcttgatcacggtgtttcttctcgcttcatcgatatcccttgtatcgatttcaagatgggatttgcttggaatgctgttgattgccccaggatgtagctccagaataccaacagttccaacagtatctattgactccgactctaatacatgtttctccacggcaagagccaactctgcagctgcaagcccggcatcatttctatatggcataagtacagcaccagcatgacctccattgccttcaaattccaccttcaaacttgctggagcagca

SEQ ID NO: 641 - DNA, 846 bp, Arabidopsis thaliana
ggtttctctgaagctccagaagcggctcgccgcatcagtgatgaagtgcgggaagggcaaagtttggctcgatcccaacgaaagctccgacatctccatggccaattcccgccaaaacatcaggaagcttgtgaaggatggtttcatcatcaggaagccaaccaagattcactctcgttccagagctcgcaaaatgaagattgccaagatgaagggtcgtcactctggatacggtaagaggaagggtacccgtgaagctaggttgccaacaaaggtactgtggatgcgtaggatgcgtgttcttaggcgtctgttgaagaaatacagagagacgaagaagattgacaagcacatgtaccatgacatgtacatgcgtgttaagggtaatgtgttcaagaacaagcgtgtcttgatggagagtatccacaagtcaaaggctgagaaggctagggagaagactctgtctgatcagtttgaggctaagagggcgaagaacaaggctagccgagaaaggaagcatgctaggagagaggagcgtttagctaagggtcccggtggagatgttgcgcctgtagctgctccagcacctgctgctacacctgctccaactgcagctgtaccgaagaagaagtctaagaagtgaagaggatatatagtgtgaagctatatcgatcatcagttcacggattagactctgaagaaggttttgaatgttttatcgaatgcgtttgtggaataacttttattttcgcaaagaacataacttatgtcagttaatctttatgctttcagatttttagcttacagtgtttcaacagacctactttgcaagttgttctttttttg

SEQ ID NO: 642 - DNA, 845 bp, Arabidopsis thaliana
  misc_feature (1)...(845): n = A,T,C or G
gggaaaccgcaaactcagcggctcgtgagtcaagcgcttgtattaatcacggtcggtggaaacgattttgtgaacaactatttcttgtttccatattccgctagatcacgccaattcactctaccggattacgtccgactcctaatttctgaatacaaaaaaatactattgagnnnaaattcacttggagtgggtcgagttctagtgacaggagctggaccactagnatgtgcaccggccgaactggcgagatcnnnnncgtcgaatggaagatgctcggccgagctacaacgagctgcatctctatatgatcctcagctacttcaaatgataaatgaacttaacaaaaaaattgggagaaatgtgtttattgctgctaacactaaccaaatgcaagaggattttctaagcactccacgaagatatggatttgtaacatcgaaggttgcttgttgcggacaagggccgtacaatgggatgggtttgtgtacggttctatcaaacttgtgtccgaaccgtgagttatacgtcttttgggatgcgtttcatccgactgagaaagcaaaccgcatgatagtccgacatatcttgaccggtaccaccaagtatatgaaccccatgaaccttagctctgctcttgccctatgagccacacacgttgaagtgggaaactcggttttgtttatttcactcgcaagatatatgtatcgactaccgagtacaagagtatgaaataagataactcagtctcaatttaacttgttctttcttaaaattttaattggataaacttgttttgatttgatttacttatagagtatttgcattttgcacccaaaaaaaaa

SEQ ID NO: 643 - DNA, 845 bp, Arabidopsis thaliana
ctatctttgatggtcacttagggcatgatgtagccaagtacttgcaaaccaatctctttgataacatactcaaagagaaggatttttggactgatacgaaaaacgctataaggaatgcatacatatcaaccgatgctgtgatattagagcagtcacttaaacttggcaaaggtggatcaacggctgtaacaggcattctgatagatgggaaaacgctagtgattgctaacgttggagactcacgtgcagtgatgtcaaagaacggtgttgcttctcaactctctgttgatcatgaaccaagcaaggaacaaaaggaaatagaaagccgtggtggctttgtatcaaatattccaggggatgttccaagagttgatggacaactagcggttgctagggcgtttggagataagagcttaaagatacatctgagctcagatccagacataagagacgagaatatcgatcatgagactgagtttatccttttcgcaagtgatggagtttggaaggtgatgtcgaaccaagaagcggtggatttgatcaaaagcataaaagatccacaagcggcagccaaggagttgatagaagaagcagtctctaagcaaagcacagacgacatttcttgtatagttgtaaggttccagtgatagataaacttttgttgtctataaactttaccattccggtgtgtgtgagagggagaaacaaaagacgtataaaacgcctatgctgtgtgatcaaagtcatgtcttgcttaaacaattccattgacaataaatgttctggccacaatgtaaaatccatggttgttgatccaatactctaaatggtttcttttaaaaaaa

SEQ ID NO: 644 - DNA, 845 bp, Arabidopsis thaliana
ccctttttttttttttttttttttttttttttttttttttttttttttcactaaataagataccatagaatagatactatgatacgaagcaataaaaactagagtatgtcttaatcattacacaacacaaattgcaatgagtcttgaaggaccaataccttcattgtactttgaattattttgcaccaaaacatattttatgtagagataaatctgagcaaagaatccccagatgcatgcagagagttattgcagctcggtttttcgcagacgagattatccgagatgaagaattttcttgtcgggatcagagtaagaacctccattaccagatccagaaccagcagtcataatgctatgagcaaagtaattgcgtgaggctaaagcttcaattgcattaatctctgaaccactaaccatttgatgatggtgttgttgatacctctccacttctgctaccttagttcttagatagatgttctcattgtcaagctcaatctcccttttctgcgcgttttcgatttcaactaaaagcaactcatgcttcttggacctgatcctagagatagctttctcaaggcgattctcaacttgttttagttccttgacacttaaggaactcaaagagtctcccatcagattcctgttggagttttgaatcgtttggatctgttgtctcagcttagcagattcttgttgatagtacgcggcattgatttcttggacagtgctagtgttggtgctatcagaacaagctttcttgtacctctcaatggttgatcttatgttgttattggcgtattcatagagacggccacgagtggagaaaacaatgagcgcaactt

SEQ ID NO: 645 - DNA, 845 bp, Arabidopsis thaliana
tcgagcggccgcccgggcaggttgctactgcgaagaacaacaaattccttgtttatcatggcgaattccggcgaagagaagttgaagctctactcttactggagaagctcgtgtgctcatcgtgtccgtatcgccctcgctttgaaagggcttgattatgagtatataccagtgaatttgctcaagggtgatcaattcgattcagatttcaagaagatcaatccaatgggaactgtaccagctctggtggatggagatgttgtgattaatgattcttttgcgataataatgtatctggatgagaagtaccctgagccacctttgttacctcgtgacctccataaacgagctgtgaattaccaggcaatgagtattgtcttgtctggcatacagcctcatcaaaatctggctgttattaggtatatcgaggaaaagataaatgtggaggagaagactgcctgggttaataatgctatcacaaaaggatttacagctctcgagaaactgttggtgaattgcgctgggaaacatgcgactggtgatgaaatttacctggctgatctctttctagcaccacagatccacggagcaatcaacagattccagattaacatggaaccgtacccaactcttgcaaaatgttacgaatcatacaacgaactgcctgcgtttcaaaatgcactaccggaaaagcagccagatgctccttcttccaccatctgattctgtgaacccataagctactctcactttaataaaacctcagacaacaacaacaacaacaatgataataataataccttgtactcatacatgtatcatataaaccagttacgtatattata

SEQ ID NO: 646 - DNA, 844 bp, Arabidopsis thaliana
  misc_feature (1)...(844): n = A,T,C or G
tttttttttcaccaacaattcttgaaataaagttaaataaacattatgtagtgtatggtctaaaactcatacaaatgtcgatagtgttacaaaacaaggacataatcaaacaatggaccatgggggttataattctctctcaacagtgaaaacaaaaaaaggcttcaatttgagcagcacccgagtttcttcagcgcagagacatcgtttttaacttcgattttctcacctttcgggacagaggcgttcccatcttcaccagcttccacttgcttcttgcttgnnntgcgataaatttgtgtcaacacctctgcaaatgcgtcctccacattggtagcttcaagggcagatgtttccatgaagcagagcgattcttgttccgcataggacttcccgtcttctgtaggaacagctagcaagtggcggagatcagatttgttaccaaccagcatcactacaatgtttggatctgtgtggttcttgagctcctttaaccaccgatctacgttctcaaatgttgcacggcgagttacatcatatactaggagtgcacccacggctccacggtaatatgcactagtgatggcacggtacctctcctgaccagcagtgtcccaaatctgagctttaacgactttgccatcgactttaaaggtacgagtggcgaattcgacgccaatggtggatttagactctagattgaactcgtttttagtgaatctggaaaggagattggatttgccaactccagaatcgcctataagaacaactttgaagaggtaatcgtagtcatcttccactctgtaccctgccatctccgccgtctccaggtggttgcttcttc

SEQ ID NO: 647 - DNA, 844 bp, Arabidopsis thaliana
cttttttttttttttttcatggaaaaattgttttcatttataccttgatcgctcgaaccaaatttttggacgagggtttgaaaaactgttcattgtttaagaataatgtgattggaatgactttctttttagtatcgagtaaaatttgtttatttgaaggtaaagttttggtgggtttgtctcaaaagcaaatatcgtagactatgaaccgacaccgtattggtctttggatctcctccggggccttgttctccatagtatggcatgaggactcggacataatctgtatggcactttagttggtgtcggaatctcaggaacctgtaatccagaaatttcaatttgtgaaaagtcaaaattagttaaacaatctgaagtcgctgtcgccgtcgccttagaggtcttgtgtcccttaaccttcaccggaggcgaaagttccggtgaaggctgctttatagccatcactttgcaattgaaatttctcgctacatcgatcccacttattgcccatctgtaaagaaagctgttctgatggagaccaacgagaagcatcgaagcaccaatctctttgacaacttgagcaatcattcttccatcatcatctccttctctcacaatgatctcagtattcgtctgtcaaaattacgatcacaaaggaaaaacaaacgttgaagaaagagtcgcagatttcacggaaagagagagcaagattgtatccgtgacggcggaggagacgcgccgccgtggatttcttcttacgcggtggaggagagtacacgtggaggagtactatgacgtcaccttgacggaggaggttgtgaagtgcccattgtaacgccgtcct

SEQ ID NO: 648 - DNA, 844 bp, Arabidopsis thaliana
cgtcatcccaaactacacctttgggtgcatcaacaaagctagtggaacatcgttgccagcgcaaggactcatgggcttaggtcgtggtccattgtctttaatctcacagtcacaaaatctttatcagtctacattctcgtattgcttgcctaatagtaagtccagcaatttctccggatcactaagattgggacctaagaaccaaccgatccggatcaagaccactccattgttaaagaaccctagaagatcatcgctttactatgttaacttggttgggattcgtgtcggaaacaaaattgtggatattcctacaagtgcactcgcctttgatccggccaccggagccggcaccatctttgactcggggacggtctacacaaggctagtcgaaccagcttacgtggcggtgagaaacgagttcaggagacgtgttaagaacgcaaacgcaacttcactaggaggtttcgacacatgctactccggctccgtcgtgttcccgtcggtgacgtttatgttcgccggaatgaacgtgactctgcctccagacaaccttctcatccacagctccgcaggtaacctcagctgcctcgccatggctgcagctccggtcaacgttaactctgtccttaacgtcatcgctagtatgcagcaacagaaccaccgagttctcatcgacgttccaaattccaggctcggaatttcccgtgaaacttgcacctaagttttatcgatttgtatttttgttttcggtcgatttcgtaatgcgttttgaacttttgaattttggaaactatataagttaatgatttttgttaattctcaaacgattgtaaagcggccg

SEQ ID NO: 649 - DNA, 844 bp, Arabidopsis thaliana
cttttttttttttttttaataagcaaaaggcaagaatgattctgattctgattcaagagtgttacaaaaataaaaacaacggtcataagagttttggcacttgggaaactctgatgccgagtcttgttcaaaaaagatcaaaaaacattttcaactgtgtttcaccaaaacggtagatattttgttttattccattcataaaatttttaaagatatgaaaatgtgcaaataaaaaaagaaaaatttgcggcaagggagaggccggaatcagtggtggtgctcatcgtcttcgtcaccgtgaccatccggaggaccaccaggaccaaccacttccagctcaaagtactgagtgcaaaccgggcattcaaaggactttcctttctccagccagaaccagacaacatcgtgctcgtcctcgccttcaccaccagggcagcccacaattcgcttgtcatagtaggacttcacaatagcaggagcttccttagttccaaaaggaccttcagggaagtcaatatcatccagcctccttccctcaagttcagcttcaagctcttccttctcgtgtccagtcgcaatgggcattacatcctccaccttcttcgtcgcaggagtctctactgaatcggagctgaaacgacgagggataacgaaagaagatgcggaaatggctgatcgattggcggcgagatagaaaccgacaggtctggtggtggcggctatcgatcgacgaggagaagcagcgacgacatcggcggctagggttttgagctgagaggagacgattcttctccacatggtgatgatgatgagtcaaaggaatttcgagtgagattgttttgtg

SEQ ID NO: 650 - DNA, 843 bp, Arabidopsis thaliana
atcaacgattcctactctctccaactcaaacccatcttgtttacttcttcaaaagtccatctttcctgggtccaagttaaccctccatcgaatttttcgttatccgaagaaaatctcaaatggctctactcgtgcttcactgcttgagacccctatcttatgggctggtcggatttgtgtcttctacgctctcgtgaaagctggctttgctggatccaagtctaaccctatcgtttctggtttggatactggtggtgttgatgttgaatatgatgatggtgctgatcttggtttctcaaagtggcttcagaacattaagggcaacaaaccagataaggatgcagctgataagaggaagctagtgagcaaatggcacccaacgacaaagggaacacttagaaggaactacaggataccttcgaaagccgaaggaaaccgtttgcttaaagccattgcgtctcttctctcagatgatgatcattttagagatgcaacatctcacaagggttgtcaaatacggagggagagtgcgcacggtcaaagcgtatgttgcaacaatgtgagagctctgtttgatgagttaccgacgccacatttggtggtggagatcacaccttttccagccggaccgctcacagagaatgattaccttaaggctgagaagctggagaggattcttaggtctggcgccaacatttgaaccctcttggcagtgttttactatgtgtcaaaatctagaacctgtacatactctacgatgtcttatgatgcagaatgttcaaatgtttagactctatgaaactgttagttttttgtgaagttaaattatcaaaaaaaaaaaaa

SEQ ID NO: 651 - DNA, 843 bp, Arabidopsis thaliana
ccacgcgtccgactccattcccaaggaactggatcccaaatcatgagcaagttttgcaggagtacatcaggctacaagaccctaaattcttctgtgggttgcataggtcaataaaacgcgagggtctaaccttgccccaggatgagatctcagaggctgtgtgggatttcaagactcttggtgcttggagatcaaagtatgaaaataaaagagaagcagatgatgggttgcagaaattagactcacaaacatgattgtctaccattacctcctttatttggtgtatctggtacaaggatcatgataaaccagagactgagagttatagcggagaatttcatcgctattcttttttaatccccttcttcgcaagagaccctgattctggatctggcttccttacccaacaaatcattgaacttggccggtggtattagcaaaggtgatcttctcaggatctttctctttatgaagatatcattcacaggaacccagatcatgagctctttgcttttgactccggtaagtctcctcatacggcggtcctcaacaaacgcagttatctccgtgtcatataaaactctgcgacctatctcacggaatgtatgctcaatcttgcttctcatcctcatccacacaaacccttttgttttgttgtacccaacttccgtcatatccttcaatggcaacaatcccgtgggtagtttgatgagagcaagaagctccttggctttatcaagacaaagagattgatcactgtagctctctatgtcatcactctcatctattatcatctctcttaacgccataataaatcactttgttttaaaaaaaaaaaaaaaa

SEQ ID NO: 652 - DNA, 842 bp, Arabidopsis thaliana
cactggcacatcgtgttggcatggtaattggcatagaaatgaatgcttcggctgtagcagatgccgaacggaatgcaatgatcaatggcataagcaactgcaagttcatctgctcaaaggcagaggatgttatgagctctctacttaaacagtacctagatgtggctcaaatggaagaagctaagcctctatgtaatgctaacgatgatctcaacaaacaaattccctcaacagaagaaatgacaaactcggagcatgtagctgatcaaaacctacctccttcaaacactcgagtggaagaacttcaagacaatgagcagaaggattcctcgtccttagaaccggaaaaatctacaaaaccacagttcaaaaatgtggttgctatagtcgatccacctcgctctggacttcatccagctgtaatcaaagctctaagaacccatccccggttaaagagacttgtgtacatttcgtgcaaccctgaaacgctagttgcaaacgcgatagagctttgcacgccatcttttgatgaaccggatagaggaaacaaaaattacagagggcgcaagaaaataggcattgccgctttggctcgacatagagccaagtcaatgccaacttctgaggcttttagacctgtcaaagccatggccgttgacctttttccccatacagaccactgcgaaatggtaatgctccttgagaggtaagaatacgcaataaagtctttaagagaatgatgtagcaccaaaagaacaagcaacaactattttgttttgcataaacacaatttaaggattatatatatgtttaagaactgaaacaaaaaaaaaaaaaaaaaa

SEQ ID NO: 653 - DNA, 842 bp, Arabidopsis thaliana
gcgtgctacagtagacgaaagaatcaaagacattgctttgaaattcggatcacaagtgccaaaatcaaagctttatagcttccctaaggaactatcatccctcccagaactcctcttccatcttagaaggggtcctttactgggaaacatcattggtcatgaagatgaaagatcggtgctacgaaatttgtttctaaacgcatctttcgatctgtctcttcgtatggtagcaccccgttgcttgatgcaccaagaaggtggtacattcgaggaactaccagcgtatgatctctctatgcaatcagataaggctgttattcttgaccatggcacagatgtatttatttggttgggagccgaactgtcagctgacgaggtgaagagtgctgcagtcttagcagcttgcagaacgttagctgaagagctaactgaattccggtttccagctccacgtattctcgcattcaaggaaggaagttcccaagctagatattttgtttgccggcttataccagcacataaagaccctccttatgagcaggaagcaagatttccacagataagaacattgacgacagagcaaagaatgaaactaaagagtagttttatagagtttgatgaagccagtttctgcgaatggatgaggagtttgaaagtagtgcctcctgagcccaggtagtcatacattttattcttgcttcatcgtttttttttgccgccttttactgtcagaacattttttttgttctctgtgagtcttttgtttttaggattctctttatatgatctccagttctctcaagtgaattatatactttgtccgttacagcaaaataatgtgt

SEQ ID NO: 654 - DNA, 842 bp, Arabidopsis thaliana
acttcggagggattagcaagcgttgattcttggttatatcgccaaggtttcaacgttgattcatggttgctttctgataccttctctcacgacaacgatttgctcgcaagagctctccataccaccgtcacagcccctcatactctcactccttcctctgctttcttcgattcctccgctgtttctcacccttcttccactaacacactctcctctaccgtctccggtgcttctgatccagaaatcatcggcggaggagctaaacggaaacgtaactgccttcttaccgacggtaaagccgccaagcgccgcgctcgtgcttccaagaaatctcagactactttcataacggcggatccgtccaactttcgtcagatggttcagcaagtgactggcgccaagtacatcgatgactcttcttcctttggtattttcgatccgattgtcaagccggagccgcttaggttcgttaacaaactgccttgtggtccttcggatcgatccacggcggttccaatgctcgacacatcagcatttttgtctaatcatcaccaggagaatctcgcagtgggaaatgctttctccggtaacagcagcagtgtaggattaccgtcggggaagccaagtgcaacggccgaccccggtggttctgccgtggagtttgataattacccaacatttccaacgcttgaatcgtggaaggttatgtgatctgtttctttcagtcttagacgtaatctttaactttttaggtttgttttctttgcatcccttcatgaataatcttgttcatagtttttgtttatcgatgtaatggatcaaatctgagttcttttgacttt

SEQ ID NO: 655 - DNA, 842 bp, Arabidopsis thaliana
attcgcggccgcctttccagctggaatattaatccgaagcacgaggcactgtaacggtccaaaaattccagctggattgcataactactcttaaaggcgcactctaacctactcctacttcactctactgttaacctacgcctctgtcagcgtactctagcatgacagttataatttcatcggcggcgaggttttattcgattttatctgcctttcgatcagttataacagaaacgcgactcgcaatattttaattggaagtaaacaaatcgacatgcgatgcgacgaataaaaattaagattgcgattgctagaagtcggcggttttccggtgagaagtccggcgacggggaagtgatttcgtcgtgaagctttccgtctcttgtaggtttcgtacactactacggatggatagagtatcggctctgataaatccagaaatttcgtcgccattttcgtcggatgattctagatgtttcgaaggacgcatgaatccattaaactgagccaaatctgattgagacggagcgtaagaagtgaggtaaaggatgataaagcagatgagagtgagaatcggaatgaagtgaacaagcttctcttgtttctgattcgtcgtaacaaaaggagattgcaacgatgataaccgtcgcggcttaaagtctttgagctcgtgatcgtcgtaatctactgcggatgacgacgaagaaggagaagaggaagctggtttcaagtcatcaatatcgtaggtatcgtcctttcgtcctccatagctatggagcttcgaagctgatgagtctaacgatatcctctgcatcgccgacagagaacctgcccgggcggcc

SEQ ID NO: 656 - DNA, 842 bp, Arabidopsis thaliana
  misc_feature (1)...(842): n = A,T,C or G
tcgagcggccgcccgggcaggtaccaagatcttctcaccggtgatgagcttctgtctgactctttcccttacaaggagattgagaatggaatcctctgggaagtagaaggaaagtgggttactgtgggagctgtagatgttaacattggtgccaatccatctgctgaagaaggtggtgaggatgaaggtgttgatgactctgctcaaaaggttgttgacattgtcgacccacgcgtccgggcggaatcttcagagcctccggttgttctccttcaccgaccaccgtctctaactttcatggacgagattctgactcgtgaattccgtactctcatcaccgacacttcatcatcggaatcactcccgagcttcctcccccgtcacgcctcctccgccagagccttcgttatcaccggcagacttccggtaaccgaagaactcctttctcatctcccttctctccagatactcgtctgcactagcgtcggcatcgatcacatcgatctcgccgcatgcaagcgtcgcggcatcgttatcaccaacgctggcaacgcgttttccgatgacgttgctgattgtgccgtcggtttgcttattagtgttctccgtcgtattcctgcagccgatcgttacgtccgggctggtaattgggcgaaatttggggattttcaattagggtccaaggtaagtgggaagagagttgggatagttggattggggnnnattggatcatttgttgctaaaagacttgaatcatttggctgtgttatctcttacaattnnnnnagtcagaaacagagtagtccataccggttttactctgacattctctcgttagcaga

SEQ ID NO: 657 - DNA, 841 bp, Arabidopsis thaliana
ttttttgaacaaaatcatttcagagcttaaacaaaagagtcacaaaaagattcagaatactgattgtgtccaactaaaaacttaaaacaacaccagagataacgataagtaaaaagattcaggctgattataattcttcttcaccggaatgagaaggatacttcagttctgatactcttcagtagtgggctggcaaaaaggcacttcccggctgacggttagccaaaggtccatggcatgagaggaacttagcgttgacaccatcagggacaacacgcttctcttgcctcaacttggtgaagtcagctctgttaaacttcgtgaagccccatttcctgctgacaataatcttttgacgaccagggaacttgaacttagcacgacgaagagcctcttgagcatggtgaccatgggcatccttgcaacgaacagacaaaagaacctgtccaatagcaacacgagcacaagtacccaaagctttaccaaaagcacctctcataccagtctgaagcctatcagctccagcacacgaaagcatcttgttaatcctgagaacatggaaaggatgaaccctaatcctcaaatgaaaagcatcttttccagcagacttcaccatgtacttgttgcaagcaatacgggcagcttcaagtgcttcacttgacacattctccttctcccatgacaccaaatggacacagaatggaaactcatcaacacccttcctcttcataccaacatcgtagatcctgatttttggatctggcacaccacgacagtagcgagactttgggtatggcttacccttgatctgacggtaacacctcgcaggtcttcttcccat

SEQ ID NO: 658 - DNA, 841 bp, Arabidopsis thaliana
tgcaaataagataatgagatctttaacttatgtgtccaaggtagttgcagcaatgaccaaacaattggtctcggaagctgttctaatgtaagatagatggtttacaaaatgaggaaaaaagaataaagaaaaatgaaagagttggagggaatgtacaagtcagatatgaatgatgagaatcaagcatcatcagtatcgctgtctccggcttcaacttcttgagccacccaataattgttcccatctggaccccagaccttgtacctgtcaagaatatgaacaaatgcatcatctcaagtatctctgtcaaagaagatacatcagcggttatgattaatcgggtattaacctttcgagaacagattttccttccttgtacttttgattcttctcaaaagcaaactcatatttccatccaacataagagccgcatttgacacagtaaatatcgaccaccgtatgcattcccgtcatcatcatcctatcttctttcttgccagcatacacattcactctgttcacacaaatccataactggtgaaaatgcatagctcgtcctatccatcaaaaggatcttcgggtttcttcaaatatggctagcaaaaaacaccagatcaaacttggagaagaaaacttacaccttactgaagaggtaagctttcccatgtcgggactgaaaagacttagagactacatcatcacagagagcaagattggtcttgcagtgcttacaactgtaagacttgccttccaaattcaccaagaacaatctccccatctctaaactattcccagaatctataaaagcaaaaaaaaaaatcaaatcttttgctgagcaaag

SEQ ID NO: 659 - DNA, 840 bp, Arabidopsis thaliana
  misc_feature (1)...(840): n = A,T,C or G
aaaattcttagatactctttacaagaaaatcttgacgaaacttgaagaatacaagcatggaatccatgacaatgataattctgcaaagcttaataatctttattaccatcctctttttcaaaaaacagaaaagagggaagaaaagcaacacacctcggtcaccaccgagacttccattgatcggaaaccttcatcaactcggccaccaccctcaccgatcannatgctctctcagccacagatacgnccctctcatgctcctccatnnnnnncgtgtcccagttcttgtagtctcttccgccgacgtggctagagatattttgaagacgcatgatcgcgtttttgctagccgtccacggtcaaaactcttcgagaagctattttatgacgggcgtgatgtggccttcgctccttatggagagtattggaggcaaataaagagtgtgtgcgtcctccggctcctcagcaacaaaatggtcacgtcctttcgaaatgtgagacaagaagagatcagtctgatgatggagaagatccagaaatcaagttctttgcaagtgaatgtaagcgagctcttggggagtttaactaacgatgtgatatctagaattgctttgggacggaaatatagcggtgaaacagattctaaagagttaatgaaaaggctcatgatgctaatgggcgagtttagtgtggggacttatgtaccatggcttggatggattgattggatctctggtttggatggacagctaaataagacaggcaatgatcttgatgaattcttggagaaagttgttcaagatcatgtagatggtgacggacaaaggactgattttgtgg

SEQ ID NO: 660 - DNA, 840 bp, Arabidopsis thaliana
aggaagacaaaattatatcttccttggaacacattttatatccatccacaagtccccccaacacatgatgctaaactataaattgcaatcaaaagttaatatttacagacagctttctcagattcaaacctccatttctatcttataaacaaatttttgtattccaaggcgactcagagagaagaaaacgagcttgtttccactttcattcactccaccacaacacaccacattgggcctaagaaccattctgcaatcccacgaggctttttcccggtaactacaaaagaagattggcggatgtttgcttcaggtcaatgattatgatgattgtttggttcatataggacttgctttagacacctgatttttcgacactgtggcggaggcccagtcttgttgaggaccttgaggttgccttggaacagtttcatagttgacataagtaatccttctggtgtcttcttgcctactcacaatgttttgagggggtaactcccgcaaaacccataaaacgaaagccaatgggacggtggaacctatgaaatagtatatgatcagaagaaccaatgctttgatgccgtgtaatttgcttgggttccaatgataaaagagtggaatgtgtgtgagaagagcgattaaagagctaacagtgaagcaaacaactgagactcctgctagacccgatacctttcgcatctctgatgaaacttgttcagaccgcacctttcttagattaaagagcagacgcaggccatagaagcagattcctcctccagtgattaggattattgcagcaaaaatatcgacatacacctcagccaataatgaagaattcat

SEQ ID NO: 661 - DNA, 840 bp, Arabidopsis thaliana
ttttttggaaactaaataatttagtttaaaatctttttctagcgtacatgataaccaagaacgcacatatgaatatactatatagggagtagggaccccacacatataccatgaagtttgttgacattaacgtttgaagaattaaaagaataggaattacaatacaaatgaatcatttttgggacaaatgtcttcttaaagataaagaaaaaaaaaactaaagaacgaacttcatatctatttttgggacaaatgtcttcccaaagatatattcaagatcattctctaacggagtcagattcaaatccaaactcaaaatcctcttactactaccgcatcgtttcaaaaccggcatggatggaatcatcggagagatgaacgatggctcgaccgtcatgcttgacctatgccgtctcatgtgaccacctaaagcctgtccggtcccaaaactctgactgcatatggaacacttgtgaaaatgatttcctttataatcgttgctaagatgtttcacatctttctgctcaacggtgagctttggcttcttatggcttgcccggtggccaccaagggcttgaaacgaagaaaatctcttgttacatgttttgcattcgaattggttgcttgtatggctctcggtatgttggttcaaaccgatctgtttgaccatggaggtttgtgctagtatcatcagacatttagcaatgtcaatattcttgagggattcttcgaaatcagatctttctctcttcatacttctttgagaattaagatctgagagggttacaaaacaaaacaaaaataaagtaaaggttggagtttttgcttgttagaaaagaa

SEQ ID NO: 662 - DNA, 839 bp, Arabidopsis thaliana
tttttttttttttttttttttttgcaaaaccaagtctcatttatagtttagttaatataatatggctaagcttttcgcaaaagctacattggtctactatcttttagcattcatctttttttttcctacgcattcataaatacatactctcacaagcatagtcttttgatatatataataggattagaaaaagaaaagaaaaaaaaacaaagtgttcttctgactcaagtctctcacgcttgtttcttcaaagcacccgtgttggcaaaaaacaccttgaaatgcacccaaacccacctcctcctcttttccttttggatttgactgagagaagttgtggggaaactttgtacaagtcttcatccacaggctttggtgccttcatcctccgcttcacaaccggtgttggacagcttaccggcgcgttaaactcacgcgcctccgtcttatagttgtgttgctgcttcgacacatttctcttcttctccgctggttcttgacccactttagcccggcgacgagggacaatgataacggccggagctacaaggtggtggttgtcgtagagatcaccggcgaggtaaagatcacgatcttgagggtaagaagcatagtgaagaaaagctggttgttgagttgttgctgtctcgaaacactgagtgaatggaacggcgtcgttccaatcccagcttccaaaagctggcacgtgtcctctccgacagtactctcctcctccgtattcgtagtccattgtcgtagtagttgtgaatgggtttgattgatgatgttcggacctctctgctttaagtaatctaaatagagaaagagagaagagagag

SEQ ID NO: 663 - DNA, 839 bp, Arabidopsis thaliana
ctttttttttttttttacttattcatgtttatctatttcttattcaaattaggaaaaacatattctaaattgcatatatatacattgtatcaatgctattgagatcaacaagacataagaaagagttttcccccaaactcttctctagtttctacatcttatgagtcaagaatatctgagaattaactttgtaggttaactccttctggtcaggtcgaaatcctctaatacgtagctgttggtctccatcggttctttggaaatctgctgatttgtaactttaatatcatcttcatctgaaaagatttttgaaccaattccacttctccgtgattccttgatgagttaagtttttggaataagttgatttgtagcttaaattcttcgggttgggctggtatgcttcttgaaaggcacatatgtatttggtatgcttaggttggttctctcgtggatcttggtcgacttattggtgcctcctccatgatccttggttgatgctgacttgatgaccccatcatcgttgacacattgtatcacttctgtcaccttttcccgacaaagctcgtattatctgtccactttcatcacagatctaaccatatcgatcgacagtgtaatccattgcagagttctttcaagtttttgtttgcttgcttggtctaacaactaaatcaataaaagtaaattagtttgagacacgtatatctgacatttgatcgaaaatttgatattgtctagcctgaaatagattcctttcttcccgtatatgtgctggtacaaaagcagatctaaccttcgctttatctcctcgcctttggtctagatcggacgcgtgg

SEQ ID NO: 664 - DNA, 839 bp, Arabidopsis thaliana
tttttttcactgaatatgaaattttaaagcaagaactttggtctgcagctgctcttaaaacgaacatacaacacaaacttgtaagaaatctcgactaactacacttacgtctttgcttatctgactctgaataaaatggaaactgaatattttagcaaaacagtggtgtgaaaaacctttaaacccaaagatgctcctccatcgtgctgaaaaccatgcctatctaactaacggtaagagtcacacaactgcataggcaaaatgaaaaccaaagggaacaatgtatcaggttctaataatcaccgactagttgtatcacagttccttgtcttcaagctgtgctttttctgctgccttttcagtttcctctacaacaaaagccttgagcgattcaacgtctctttttcctttatatttcgaaacttcttctccattgtaaaatagcataaatgttggatacgagtgaatttcaactttggtgcaaacagctctgctagtaccacagtctacttcaccaacctcaatttcatcgtctccctccattgcttttcccaagtcttcccacaaattccccagtttcttgcagtgtttacaccaaggaacacaaaactttacgaaccacgcagtatccttctcctttatcttgtcagaaaaggtttctggtgtcagtgtaatgacttccgctttaactaattcaatcggtataaaaaggagaagtataatcatgggagcaacaagccgagcacctagcgtcatcgtagcaaaaccccaaattttgatacttcaccagtcctgttaacttttcttccaaatttgcaacttctgcaacaccaattccg

SEQ ID NO: 665 - DNA, 839 bp, Arabidopsis thaliana
  misc_feature (1)...(839): n = A,T,C or G
tctttacttatacgggtcttctcttctctaccaaaatcatacaaacaacatcacttataagaatgtaagnnnnatacaataattaaaaaaattannnacaacgttaataaanaatgttgctactacaataatgaaatttgttggttgtatgatcattggtcgtaatttttgtgtatcgtgtggcttactcatcactccatatctcnnaggctttcactagtcaaccacagcttcttctggacaatgaatacaacattgtctgaatcttgatctgaatctgagtctgtcttggtacctacttcttcccaatgcaatgccttnnnatacttcttcacaaaatccaccactctttgtttatcccttatgattataaacccgctcgggcgcagtattcgatccatctccagtaacaaatccacttcactacatccttttttcttgatatccgatataatatcccaagcatggaggagatcatatgtccttggatatgtcgagaatgcttcacaccagctatgaaccgcgcccattaaacctctgtcatatatcagtttaagcgtgttaggtccgtcctcaggaacaacattcattacccagacatctttttctttcagagcagcagcaaaagagcccatgcttgctttcatgtccattatgttcctcactgtatctgattcgattcttggactcaagagatcccaataagtatctactctctgcctccaaagttccgtgtccttctcaaacatgcccgttgaatatccaaaatcagcaagtctgggaggaggagaggttaaccgagctggccatggagctaatccacttcccttggttttgtg

SEQ ID NO: 666 - DNA, 839 bp, Arabidopsis thaliana
ccacgcgtccggaaatcgcgagagctgatttgagcagagatggatttcgatttcaaagtttccggagatttcatagtcagtggcgcagagcagctagatgacactgatttgacgcgttctgatgagttttggcttatccaagcccctttaggccaatttccagaaatcgaagagaacactcttaagattgagccagacaaagatgggttatttggagaattcaaggattcaaatggtgcaaagtatgatcttgctagctttcattctcaagatgctggtgcagagttgattataccttctgaagaatcaatgattgttgggaagattactcggcgagttgcattagttcgttaccctgaaccaaacgagttgcttcagaaaatgaaggctagaacacaacagaagcttgtcggatcagtgacgaattcctctaagaaatcatctaaccttactcaaagcagccggcataaaagcggcacacgtagcagcagagagaagagcatgttctctggcttcaccgagactccaaagtcgccaaaaagaaaaaattcagagtcttcctcaggtaaacatcggagctcaacaagtacggtttcaggctcttcagaacgatcagcaaagtccaagaagaaggtgaagaaggaagagtaaagatctttgctcctgtttttttcaaagagaatgtttgtgactgttaagatgttgaatttcgattatgcagatgataaacagccagtaatgtattcaaattcataagttatttcgccgtagatgcttataaaagttcaagcttattagctaccatggaacaaagtaaaagtaaaatacagcttttcagc

SEQ ID NO: 667 - DNA, 839 bp, Arabidopsis thaliana
tcttcacccaaaactccagaaccctagaattcgaaatctcccaagaacccgaaaaagcgccatgtcgctcactatcccgacgaatctcgttctcaacccgagatctaacaaatctctcactcaatccgtacctaaatcctccgcaagattcgtctgctccgatgacaaatcctcctcctccgcacctcaatccatgaaagctttctccgccgccgtcgccctctcttccatcctcctctctgctcctatgccagctgtcgctgatatctcaggtttgactccttgcaaggactcaaaacagttcgctaaaagagagaagcaacagatcaagaagcttgaatcttctcttaagctctacgctcctgaatctgcccctgctcttgctctcaatgctcagatcgagaaaaccaaacgcaggttcgacaactacgggaagtacggattgttatgcgggtcagacgggttaccgcacttgatagtgaacggagaccagcggcattggggagagttcattactccagggattcttttcctctacattgctggatggatcgggtgggttggaagaagctacttaatagctattagtggtgagaagaaacccgcgatgaaagagatcatcatcgatgttcctttggctagtcggatcatcttccgtggtttcatttggcccgttgctgcctacagagagtttctcaatggtgatctcattgctaaggatgtttaaaaagggaacttgttttctgcttttgtgttactctctctaatctctttgttttccattgtacttattgaaaaacaatgcattgtcgaaaaccttataaaaaaaaaaaaaaaaa

SEQ ID NO: 668 - DNA, 838 bp, Arabidopsis thaliana
ataagatcaaggttattactgcgtgatcttgacaaagctaccaagttatttggcaaacaagatgaatattccttgcaggtagttaaaggggatactaggaatgcagaggatcttgatccatccatgtttgagggtgtcacacatgtgatttgtaccactggaactacagcttttccttctaagaggtggaatgaagaaaacactcctgagaaagtagattgggaaggtgtgaagaatctcatttcagcattgccatcatcggtgaagagagttgttttggtttcatcagtaggtgtgaccaagtctaatgagctaccctggagcatcatgaacctttttggagttcttaagtacaagaagatgggggaagattttcttcgtgactctggtcttccattcaccattatcagacctggtagattgactgatggaccatacacatcttatgatctgaatactttgctcaaagctacagctggtgaaaggcgtgcagttgttattggtcaaggggacaaccttgttggagaggtaagtagacttgtagtggctgaagcttgtatacaggcacttgatattgaattcacacaaggcaaagcttacgagatcaattcagtaaagggggatggtccaggaagtgatccacagcaatggcgagagttgtttaaagctgcagaatccaaatgacaaaagaggacttttgagagatgtgtacagaattgttagcgagacattacatatatggtcgattgtgtatacatgtgctttcttttggtctttgacttcatcattactgtaattactttatctataactagaagttctttcttgcaaaaaaaaa

SEQ ID NO: 669 - DNA, 837 bp, Arabidopsis thaliana
gctattgttatcttatgggtttgttcccagagaaggaaccaatcctagtgattcagtagaactagcattatcacttaggaaaaacgataagtgttacgaggaaaagctggatgctttaaagaaacacggattatcgacacctcaatgctttcccgtaaggataacgggttggccaatggagctaatggcatatgcttatcttgtggtgagccctccagatatgagaaacaactttgaagagatggcgaaagctgcttcaaataagacatcaacaaagaatgatctaaaatatcctgaaatcgaggaagacgcattgcagttcatactggactcatgcgaaacaagcatatcaaagtacagccgatttctaaaggaaagtggatcaatggatttggacataacatctccaaaacagttgaaccgaaaagcgtttctgaaacagctagctgtagacttgtccactagtgagcgcaggatactgtaccgtgctcaatacattctgaggaggagactgagagatatcagaagtggtgagctgaaggctctacggctcttcagtggacttaggaacttcttcaagtgaatgttgaatgaggacatttcaacagctttaagatggatcaaaggtaggcctcgttgtgcttcaaccaaaaatgtagttttttattacaaaaaaattgaacgttggtgtaggcatggttggatctgtctcactcgtataggaatatattggtccagccatatatgtaatttgatcattttctataaactcaaaacctgaacctaaattgattaattaaggaaacgcatgagagagtaagggtagaaaaaaaaaaa

SEQ ID NO: 670 - DNA, 837 bp, Arabidopsis thaliana
ccacgcgtccggagaaaaaggatctgaggaacaatggctacgacaagacagatcttggagcagccacaatcgccatttattcaacgtatcaagagctcggggaacattagcatgaatggcagtcctatgattgatgagaaagaagaggagctttcacagtctgcttttgctttgtttaaggcaaaggaagatgagattgagaggaggaagatggaggttaaggatagggtccagaaaaagcttggactcgctgaggaagctactagaagattagccgagattcgggaagagcttgaagctcttaccgatccaatgagaaaagagatatccgcgataaggaaaagagtcgatgctattaaccgagaactcaagcctttaggacagagttgtcagagaaaggagagagaattcaaagaagcacttgaagcttacaatgaaaagaacaaagagaaagctatatttgttagcaagctagttgagctggtcaccgaaagcgagaaactgcggatgacaaagctggaggaactcagcaaaagcattgaaatatcgctacgctaacacaaaatgataacaataaaggctgcaaaagcagccagctttggtttcttctttcttctgctctttgtaattgtttgattcgatatttgctttttggtgtgatcaaatctgttttcctgattcagtaaccttagtagaaatgtgataaagattcagtatgatctcacatttttttgttttcatgtgtgtgacaatgttttattcctgacccttcgagttttgtaaccggaaactttaacttctatcaaaatttcttacaaaaaaaaaaaaaaaaaaaaa

SEQ ID NO: 671 - DNA, 836 bp, Arabidopsis thaliana
  misc_feature (1)...(836): n = A,T,C or G
tttaggcaactattttcattcaacttattcttgtaaagacaatgcaaaacgatttgaaacaaaagaaggaaatggaannnagggaaaaaaaaatggtaaagaatatttacaggcaaaataaacatttcttcacattgcaagtgctcgtggtcgctacaaaagtaaactaatcttaacgtagctaacaagtaattgcttcaaaactcgtaaaagtgaaatctttggtcttctcttatgtgaactcgtatgatctcaaaacttgcacgatgtaccaagtctctgtgtgttcctcaacgtcatggtcttgcgttctgcaaaagccgagtaaagcaactcctgaaacctctccaagaacacaacccattcaacttctttcatgtcggctaacttcacaaagtttacgctaagcgggagctgcacgttcgcgctcttgtgacttaccaatgctttgtcggtttggttgtctttcggaggtttcaggtatccggatcccatggtgttgcttagattgttcttcattgatgtggaaagctttgagagagatagagtaagttttgcctcctcttcgtcatcttcttcttcttcagcaatgctctctttgagctctccaagtgaagaacgtccgtttgaaaatgggttcttggcgaagaactcatcggtttctgtctcagagccataaaccgagtctagctcattgtagtctatatcaaactgaaactctgtctctccttctccatctgacttgggagacaaaacgtcttgttcagtggttaatctcttggcttcgatacacaacatttctagttcacttggttcctcttctcctgcacgaaatt

SEQ ID NO: 672 - DNA, 836 bp, Arabidopsis thaliana
  misc_feature (1)...(836): n = A,T,C or G
gtccgggagactcttagatgcgggggatgcccaagcagtgagtccacggcacgcagatctttgagtatttttaagccaaacttgagtaatgttgaaggagaaacatgggaagaaatagacacttcagagattggccatggtggtcaatcattgcgttggcttgtttggccacgaattgataaggattcactggagatgttatcctcggagtgtccaagaatagtggtaaatcccaagccatcacttgtcgcgtacagagcagacgaggttcctcgagaagcactaccagatgttgcactggacgaaccatttgtcaaagatattgatcctaagacgtgggttgttactggagttgtgcagaagcccacatctttcccgttaagcaatgaactgtcaatagcagagaagttcagactagcatttgcagagagagatgcaagaatggcccctaaacgtgcaaagaatgcaanncaacgtcaacgtcgtgctgagagggattggatgatgtcaagcgacgaagccaaagcaatggtttttgcatcaaaggctaccagatctttgcacaagagttaacaatatggattctcttcataaaatgtatgacaaagaaaatataggaggaagatgagtggatttctaagaatgcatgcctcttttctctactgtggtcaagttcaatcagtttacagcagtttctggggagcaaaagtgaatagagtggctggttagagaaaagtgtttgtaacagtttaatcttgtttccaggtctttcaattgatgctacggtcaaagatacgttaaactgtttataaaatgaagtgtgtatttttgcaaaa

SEQ ID NO: 673 - DNA, 836 bp, Arabidopsis thaliana
  misc_feature (1)...(836): n = A,T,C or G
tgtattctaccaaacaagaaatctaagccaaaacattcaaagcgatttctcaagcaaaactagaagatgaaggtaagtattatatggtttatgtatgtgtttttatggcttctttgattgacgttacaacatatcatttttttagcaaaagatcttgataagagtgactatgaccgatgacaaaacccgagcaaaagcaatgacaaaagcagttcagtttaaagccgtggaaataaaaggcgatcacaggaaccagatagaggtaaccggcgttgaagttgatatgatccctcttatccaaatactcagaaagaaggtagcgttcgcagagcttgtgagcgtgaccaaagttgaaccaccaaagaaagaagacgagaagaaaggaggggacggaaagggtgcagagggaaaaggcggtgaccaaaaaggtggcgataagaaagggccagatgacaannnnnntccggagccaaaacctgtgccgtgttatccatggcctctgcagggatacggtgtaccttcctcctttcctcatcaaggatacggtgtgccttccacctttccccagggagacggtgtaccttcctcgtttccatacccgtgccatccggcacatccctacaatgatataggggaacccgtttacaatcacgaacccaattgcaaaatcatgtgaaatgagttttacagaggaagattgatagagagagcatgatgaccaatgtttttttttattgtaaagaactaaagaagcactatgtttactatttagtcatatgaataaagctctgaggccaccaaatcaatttactgctaaaaaaaaaaaaaaaaaaaaa

SEQ ID NO: 674 - DNA, 836 bp, Arabidopsis thaliana
cttcttaacaccatcgcctgaattcgctctcctctagctcgcgattgcgaaaacatggctctacctaaccagcaaaccgtagattatcccagcttcaagcttgtcattgttggtgatggaggcacagggaagactacttttgttaagagacatcttactggggagtttgagaagaagtatgaacctactattggtgtggaggttcatccattagatttcttcacaaactgtggcaagatccgtttttactgctgggacactgctggacaagagaaatttggtggccttagggatggatactacatccatggtcaatgtgctataataatgtttgacgtcacagcacggctcacatacaagaatgttccgacatggcaccgtgatctctgcagggtgtgtgaaaacatcccgattgttctgtgtgggaacaaagttgatgtgaagaacaggcaagtgaaggcaaagcaggttacattccacaggaagaagaatctgcagtactatgagatatcagcaaagagcaactacaactttgagaagcctttcttgtaccttgctagaaaactggctggagaccaaaaccttcactttgtggagacaccagcgcttgctccaccagaggttcacattgacattgctgatcagcagaagaacgaggccgagctcttacaggctgcagctcaacccctccccgatgacgatgatgatatctttgagtaaatcatccttctagaatgtctgccgtgggaagctcttgcttgttccttttggttttctctatgttgttttggtgttacatataaatcaatcggtctttcttataacaaaaaaaaaaa

SEQ ID NO: 675 - DNA, 836 bp, Arabidopsis thaliana
  misc_feature (1)...(836): n = A,T,C or G
tttttttttttttttggcaaacttttaattttatccgtcatcgtagctaaactggtatagaaccaaccattgttcaaaatagtactaaccaaaaaacaccacaaaatgggcttctttaaaaaagcccaacataaaaagtcttaacagatcaaaaaaaagcaagtaaaagagatagagataggagaaagagagaggtcaatgtccaacaaattagtcgacctcctcgatcttaggtccagcaccgcctgaagcagggggagcatcatcgtccataccagaggcacctggaccaccggcttcaccaccagctccttggtacatcttggcaatgattgggttgcagatgctctccaattccttcatcttgtcttcgaactcatcagcctcagccaactggttaccctcgagccattgaatcgcctgctcaatagaatcctcgatcttcttcttgtctgcagccgggagcttctcaccaatcttctcgtcttggatggtgttcctcatgttgtaagcgtagttctcgagagcgttcttggcttcaaccttcttcttgtgctcctcgtcttcggacttgtacttctcagcctcttgaaccatcttctcaatctcatccttggagagacgacccttgtcattggtgatggtgatcttgttcttctgtccggtggtcttgtcctcagcagagacattgaggataccattggcatcaatgtcaaagcagactgtgatctgggggacaccacgaggagctggaggaattnnggagagctcaaatttaccgagaaggttgttgtccttggttctggctctctctccttcgtacctcggccgcgacc

SEQ ID NO: 676 - DNA, 835 bp, Arabidopsis thaliana
  misc_feature (1)...(835): n = A,T,C or G
gaagcagtaagtcaagctacgacaacagagcacttgtctgaggcaagtgacggtgaagaagttggtaatggagaaactgatgtgagagagaaagatgagaatgagcctgatcccaagagaagaagtacagaagttcggatttcagaaccagctcctgctgcttcacatagaactgtgacagagcctagaattattgtccaaacgacgagtgaagttgatcttctagatgatggatataggtggcgtaaatatggacagaaagttgtcaaagggaatccttatccgaggagctactacaagtgcacaacaccaggatgtggtgtgaggaaacatgtagagagagcagcaacagatccaaaagctgtagtaacaacatatgaaggaaaacataaccatgaccttcccgctgctaaatcaagcagccatgccgctgcagcggcacagttaaggccagataatcgacctggcggtttggctaacttaaatcaacagcagcagcaacagcccgttgcgcggctannnnntaaagaagagcaaacaacttgagagaagaaaactcttgaccgtttttcattacaaaagctttcaaattccactcacacacttgtctgaaaaatctagcagtttgcaggaaagaaacagcttcaagaggttgtagttcttctatgttctggtgtaaaacttaaaagctttttagggttttcagatttctgtttactaatactgtatgtgaattcttttgtacatgaggaagaaaattacagggggatattttgtgttgtatcttttgtgttattgtttcagtaaaagataggtcttacattttgtgtaaaaa

SEQ ID NO: 677 - DNA, 835 bp, Arabidopsis thaliana
  misc_feature (1)...(835): n = A,T,C or G
cgtccgcaggctcgaaagcgtgaagtttcaaagtatcaggagtgccgctaaggtggttggaacagtaactacagttggaggaatcatggtcatgacacttgtaaaaggtccagctcttgacctcttctggactaaaggaccctctgcacagaacacagttgggaccgatattcatagctccatcaaaggtgcagttttagtcacaattggttgcttcagctatgcatgtttcatgatactacaagcaatcacattgaagacttaccctgcagagctctctctcgcaacatggatatgcctaataggtacaatagagggagtagttgtagcattagtgatggagaaaggaaatcctagcgtgtgggccattggttgggacactaaacttcttacaatcacctatagtgggatagtgtgctcagcgcttggttactacattggaggagtggtgatgaaaaccnnnnnncctgtgtttgtaacagctttcaaacctctttgtatgatcgttgtggcgattatgtcgagcatcatctttgatgagcagatgtacctcggaagggctcttggtgctacggtcatatgtgtaggtctataccttgtgatatggggcaaagccaaagattatgaatatcctagcacgccgcaaatagatgatgacttagcacaagcaaccacaagcaagcaaaaagaacaaagaagaacagtgatagaatcagtctaacttaacaatcacggtccaaatgtttagcatggatgagccataacgtataccagctttctatgttgtccactattttgcagagcaattgtagaatataatcactaactacaaaaa

SEQ ID NO: 678 - DNA, 835 bp, Arabidopsis thaliana
gggcaggtacttgtttggtaaagtctccatgcaaatgaagcttgtccctggaaactccgcaggaacagtcacaacactttacttgaaatcacctggaacaacatgggacgagatagatttcgagtttttagggaattcaagtggagaaccttacacacttcacacaaatgtctacacacaaggcaaaggagacaaagaacaacaattcaaactctggtttgatccaacagctaatttccacacttacactattctctggaacccacaaagaatcattttcaccgtcgatggaactccgatcagagaattcaagaacatggagtctctaggcactctgtttcccaagaacaaaccaatgagaatgtactcgagtctttggaacgctgatgattgggcaacgagaggtggtttggtcaaaaccgattggtctaaagctcctttcactgcttcttaccgtggctttcaacaagaagcttgtgtttggtcaaacggcaagtcttcttgtcctaatgcctcgaaacaggggactactactggctcgtggttgtcacaagagcttgactcaacagctcaacaaaggatgagatgggtgcagaggaactacatgatctataattattgtacggatgcgaagaggttccctcaaggtcttcctaaagagtgcttagctgcatagagagagtaaagagttgagagaggaacaagattttatttttctttgtggttataaaattctattcattttattgtagatcacgtgaattttattgatttgttttgtagtatactctatagttcgttaaagttataatattctctttgttacaaaaaaaaa

SEQ ID NO: 679 - DNA, 835 bp, Arabidopsis thaliana
tttttttttttttttttttttgttgttcgtgtcctaacacacattattaaagatgagcatttgagacattcattcaacaaaagtcgctaaaactgggatgccgaaaacaagtttcccctttttttttggtttctcatttgtttgaagagtacaacgctaaacagaacacacaaaataaaatcaagagggaaactaaaccaaaaactaatttaagtttcatgaaaaatggagaaaacaagcacaaccttcaaaagccaataacccttattaatactgatatttggtcaacttcatcagaagaccaatatctcaaactgttccactctcccaccacaacccaacacaaaaccacaagtagatccgaacctgaaccgctttgtcgactctctctctctctcagtacctgtagtgaggaggcttgtatggtccctcaattggaatgctgacgtagtcagattggtcctttgacagctttgtaagcctggctccaagcttgcccaagtgaagtaatgcaaccttctcatccaaatgcttgggaagaacgtacaccttcttctcgtactttccgcttgctttctcgttccagagctcgagctgggcaatcacctggttggtgaaagagcaagacatcacgaaacttgggtgaccagtggcacaacccaagttcatcagacgaccctcagccaagacaatgattccagccttggtctctgggaacacccacctgtcagtctgtggcttgatggtgatacgcttcacaccagggtaagtctcaagtccaagcatgtcaatctcattgtcaaagtgaccaatgttgcacacaatagcgttgttc

SEQ ID NO: 680 - DNA, 834 bp, Arabidopsis thaliana
aagagagaggaagaaatggagacttttgaggaaagctctgatttggatgttatacagaaacatctatttgaagacttgatgatccctgatggtttcattgaagattttgtctttgatgatactgcttttgtctccggactctggtctctagaaccctttaacccagttccgaaactggaacctagttcacctgttcttgatccagattcctatgtccaagagattctgcaaatggaagcagaatcatcatcatcatcatcaacaacaacgtcacctgaggttgagactgtctcaaaccggaaaaaaacaaagaggtttgaagaaacgagacattacagaggcgtgagaaggaggccatgggggaaatttgcagcagagattcgagatccggcaaagaaaggatccaggatttggttaggcacttttgagagtgatattgatgctgcaagggcttacgactatgcagcttttaagctcaggggaagaaaagctgttctcaactttcctttggatgccggaaagtatgatgctccggtcaattcatgccgaaaaaggaggagaaccgatgtaccacagcctcaaggaacaacaacaagtacttcatcatcgtcatcaaactaatgggggaatagtgatgtttaattagtatatataggttaatatcttaagtatgtgaagcatcatgtatagagccaagaacctgttagactagtgtactgaaaagaactcttgcaaaatatgtactaaagagttcctgtaacaatggaacttctgcgttttctcttgtcttaaagagcttaaggttctagaaacaaagttcttgtcaaaaaaaaa

SEQ ID NO: 681 - DNA, 834 bp, Arabidopsis thaliana
gaaaataaacttaatcacatgcccattattctctgcggtgactggaatggaagcaaacgcgggcatgtctacaaatttttgagatctcaagggtttatttcatcatacgatgatgctcatcagtataccgacagtgatgctcataggtgggttagccacagaaaccacaggggaaatatttgcggagttgatttcatatggctctgtaaccctagtgattcaagaaaaccattgagaacaagttgggtggaagctgttttcagcattatcaagtatcaactacacaaagcttccatagccgaggacgatgcctttacttttcttggggcaaaaaatcacagtgattcactaacctactctgacttttgcctagcacttcaaaaggtaaatctaacgggtattccacatggacttagcttcgaagagacaaaagagctatgggtccgagctgatcttgatggaaatggtgtcttcgactatgaagaacttaagaaaatttggaacatgacgatggtaaatcaacctggaaactgcaaagagagtgtgatggagagtaagaaagaagaaggagaagatgaagcaatcggattgaaagtgaataaagcaattttgtttccacaagaagcagagaaaggattgtggccggagaattacaatatatccgatcatgcttgtctcaccgtacaattctctccagtcaaaatgctttgtagctaaattttgtttaattacggctcttgtaaatgtaaagaagcaatgagattgagatttgcaatgagacatctttacgaaccttatggagtgtgctgtatagttttgtctgtttaaagattt

SEQ ID NO: 682 - DNA, 834 bp, Arabidopsis thaliana
  misc_feature (1)...(834): n = A,T,C or G
tactaatgcgtcacggtgagtcagccggtaacatcgacgcaggggcttacgcgaccacacccgatcacaagatccctctaacggaagaaggaagagcgcaagcgcgtgaggccgggaagaaaatgagagccctcatatcaacccaaagcggcggtgcgtgtggagagaattggcgcgtgtacttctacgtgtcgccttacgagagaacgaggacgactttgagggaagtaggaaaaggattctcgaggaagcgcgtgataggagtgagggaagagtgtaggatcagagaacaagattttgggaattttcaagtggaagagaggatgagagttgtgaaggagacgagggaacgtttcggtagatttttctatcgttttcccgaaggtgaatccgccgccgacgtctacgatcgtgtttctagttttctggagtctatgtggagagacgtggacatgaacaggcatcaagtgnatccatcaagtgaactaaacctagtgattgtgtcccacggactgacatctcgagtgtttctaacaaaatggttcaagtggacggtggcagagttcgagcggttgaataactttgggaactgcgagttcagagtgatggagttgggtgcgagcggagagtacactttcgcgatacaccacagtgaagaagagatgttggattggggcatgtctaaagatatgattgatgatcaaaaggatcgtgttgatgggtgtcgtgtaacaacatcaaacgattcttgttcattgcatctcaatgagtattttgatttgttagatgtcactgatgatgaagaatgaccactaaatttatatcgctaaaaaa

SEQ ID NO: 683 - DNA, 834 bp, Arabidopsis thaliana
tttaagatctcagatacaaaactccgacatgtctacgttcagcggcgatgaaacagctcccttcttcggcttcctcggcgctgcagccgcactcgttttctcctgtatgggagctgcttatggaaccgcaaagagtggtgttggtgtggcttctatgggagttatgagacctgagttggtgatgaaatctattgtccctgttgttatggctggagtgttgggtatctatggattgatcattgctgttatcatcagtaccgggattaaccccaaggctaagtcttactacctctttgatggatacgcacatctctcgtctggtcttgcttgtggtcttgctggtctctcagctggaatggccattgggattgttggtgatgccggtgtcagggcaaatgctcagcagcctaagctctttgttgggatgattcttatccttattttcgcagaagcgcttgctctttacgggcttattgtaggaatcattctttcctcacgagctggccagtctagagctgaatgagaatctaaaccacaagactgctcaaaggtacttcctttacttctgtgtgcgttttgttttatcgtgattagtatgatgtatcatcgggaaccaaaaattttactggattcttggaaatttgtttcggaaacaaaaccgcctatcttcattctccttttcttttccggtggttactctccgatgtagaattttattgtttgattctgtaataaagaagctctgaggagtttggtatgtttttgtattcttgtatttgtcctgaggaagttaaatacatttatttgtaaagaagtttgcttttctgataccat

SEQ ID NO: 684 - DNA, 834 bp, Arabidopsis thaliana
  misc_feature (1)...(834): n = A,T,C or G
tgatctcggaacgttacaaaactgagtgatggctattcttttaagatgtaacacaaaaacaatatacaacaaaacatggtgagccaaaaacctattatataagatactaaaaattggctannaagattgctatctcggaccggagagtctcacggcggagagataattcncactgttacaatcggacggtccagatgacgtagtagcaccgnngtcctcgctgatggacttaaagaagcttgagtaaagtctcgatcccatagtggaagaactaggtggctggaccaccggaaaaacaccttcaagcatttgaacaactttgctcatcgagggtctcgtttgnatatcttcttgtatacaccaaagtgcggttttcatagccctttgaaccctttcgtcagtcacatcaacattcttcatcttcccatcgacaatatccataagcttcccttcttccatcttcttgaaagcaaaagaaggaaaatggcatttctccgaagtttctgatggatcatagttctttcttcctcctattaactctagcaacaccattccgtagctgtaaacatcactcttctctgatatcgcatagtttgtgatccattctggagccaagtagcctcttgtcccgcgcattgttgtgaagacatggctttgttcgcgggtcatgagcttcgccagtccgaaatcggataccttggcattgaagttatcgtctaataggatgttctcgggttttatatcgcagtgaacaatccttgcatcacaatcttcatgtagatacgctaaacctttggctgttccgagtgctatgttaaatcttgtgtcccaatc

SEQ ID NO: 685 - DNA, 833 bp, Arabidopsis thaliana
ctcttagttttattcagacacttgaaacaacaacaacaaaactctagaatacaaagggaatgagagccttgatatgcttggggaagtcatcaaacttggaaagataccaagttcttgtagcataactccgaccaatgagatagagcattgttcccatagcgaaagaaaatgaataaatggtctgagagatgagaaagaagctccaaaacacaaggatctcaaatagatagtgagggcatatgattatatcaaagagacctccttttggtatcttgtactctttcttcccatcttctttccttagcttagccagcaaaacatggtgatacagattcccaacaattcccaccacaaacatcacaactccggcgagtttcatatcgaaactcggctcggtaagtcccaaggtgagattttgactgtataacatcaatgctgtggatgagaaatagctgctacttatggtgaaagctgagtctatagccatccctccactgtatttatgtatgaacagaacctcgaataccctcttgaagaaatggagggcaagtgcggatttgagaagaagaaacctgagatcatcagaaggtaagacgaagaaagaagacgcagcggctagaaacgcaggtgtgtatagcaaaagcattccatttctgctagagatgctgccgaatcgctccttctgtggttgtggtgatgatgatgatacgccgaatttggagtatttgagatgctttcctctgatttcagaccaaccgatattggccagagcggctacaccaacgacgctcatacaattgagcaatatcgatggaggtggtggatatacaaaa

SEQ ID NO: 686 - DNA, 833 bp, Arabidopsis thaliana
  misc_feature (1)...(833): n = A,T,C or G
tttgggcgtgaaaagctcgttgaaagtaaaatattaaggcgttaataagtgttgatttatagaatattctctccttcaaatgggcttaacgacgctataacccccgtcaacagccagattctgaccgctaacgtaagccgaatcatccgaagccagaaacaaagccgcctctgccacatggcgagccttaagcaccacacctttgagaatccccgtggctgcgctatattcctccaccatcctcaccgtttcctcgtcacggctatttatcgccgtcgccaccgcgtatggtgcaacgccgttgactctaatcccgtacttccctagcccgccacaagccgatttaaccagcccgagaagagcgtgcttagacgccgtgtacgcgtgaggtcctggaccaccgatctccgacgcgacgctggtcgtacatacgattgacccacgcgtgcctttctccaccatggctcgtgcagcgtgtttgataaacgcagccgcaccacgaacgttgaccgccatggttcggtcaaactgttccagattcaagtcgagaaagcttcccggctgttccataacgccggcgttnnnaaagagaacgtcaagcttcccgtacttttcgacggtgaacttaacggcgtttnnnacctccttttcgtttgtaacatcgcaacggtaaaannnngctttgtctttcccgacagaaacggcaacgttttgaccaagttcttcttgaaagtcaacgatgaccaccttagctccgtggtccgtgaacagcctaaccgcttcggctccaatcccgctagctccgcctgttattattgcgattttgccatcca

SEQ ID NO: 687 - DNA, 833 bp, Arabidopsis thaliana
aaagaagaagcttaccgtggaggacagaagcagaaaagagatgatgaagacgtggaggctgatcatttgaaagacagatatactagagatgacaagaaagctgcaagagactctgatgacagtgagattgagtatcagaacaagaaacaactgcgcagtaaggtagaagtttacagtgcaggaatgagccagaaaagaaaagaggaagaagatgtgaccaaacatggcaaggacaagtatagaagtgattctcgtggcaaggaagttgctagagactctgatgacagtgaggctgagtatgaaaataggaagaagctaaagaatgaaagttaccaacgaggacgtaaacacaaaagagaggaggatgaggacaacgataaccatgggagggacagatatagaggtgatgatgctgttaaaagatatggaacaattaaggaagacgacgataggtatagaggtcgagccattgaggaagaaggagatgatgataggggtagatacagaccgagacgagaaagtgtgaaggatgatgaggaagagtataagcatgggagagacaggtacagaggtgatggaagacgagcaacgggtaaggaagatgatgatgatgatagagtaagcagagagcgtgaatactcaagcaggggtcgaagtcgttatgatgatagccgatcaagtggcaagagatcctcgcatggttgatgattcctgtttcatctttgtctgtttaaagtttcttaaatgttttgtcgtgtttgtcacaaacataatccttgttttttttactacttgcaaacgatgttttagacttaattaaggtcaaaaaaaaa

SEQ ID NO: 688 - DNA, 833 bp, Arabidopsis thaliana
acgacaatcacaaaagaatgtataaaaaagaaacaacacagttaaatgtacaacaactcaaacaacactttcagctaatattattcaggatcaaaagaaaccccaaaacaaatgctgaaatttacattgaacattcacattacgtggttaaagtgtcaggaagagccatggaatgagctccaatgatcttaccaccaacatctgggaaggtctcgtaatcaggaagagggcttactttaccatcaacgtctacttgtagaggatactttattaagtgaccttgtagctctgagaatttcgggtctatgaatcttttccagttttcttcagagattgtgttcaccttcttcagacattccagatctgatggctccacaaactcatctccagttttgcctaaatgctctgcccatagtgacattctgtatccatacacctggccacgtgggtgtcttcccttgtgagcccatgtatgattaggttggtatgcgcccatggcgatttcagtatctttggtgcctgccatagatctttggttgatattagcagatcccatgagtacatactcatcatctactatcatcccttttgcgtgcacgtaaatcatgaaacgctggaaattataagaatctgataccacactgccattggtggctggcatatcatctggaagctgctctcgtttaccaaggcagtaaaagttaaggtaatcgagaggatgagcatctgattgcaccgctttcagttcttttgctataacatcatacatcatctgcatagtttggctctgccaatatagaatttcttgcacagggccagactttgggtcgccc

SEQ ID NO: 689 - DNA, 833 bp, Arabidopsis thaliana
ttttttttttttttttaaattaatgtcaataagataaagaaagagtaatatacattaacaatcctgagtttcaagattcttgatcaagacaaagagtaaaaaacaatgatgcaagagagttgaaagtacactcgatatattttgatctacatttacttgacgaagtaaggaaggtcaagaacgtagagaaggaagtaagcccaagtcaccccagagatccctccaaagaagaatcctccagtgaacttagcccatccatcagccgtttgaagctggtcaggctgcttcttccgcccagtcaaagtcaaactcggtgcgatcgatggctctccttccttgaaagaagagataccgtagatggtgaggcacatgctgaggatgactaccagcccagccgcggctaaagacccggctgacccggcgtaagcagtgttccttaatgggccagctttgacgaatgggcccactaagaagaaaccatgggccaggcccacttccacaccgcggaggagagggttgacggcggtacggtatccagggaggttggaaaggtaccacgcgatcaatgggcttgatgtcaccggagtttccaaacttccgatgaatggatcaccgttgattggttgaactacttggaatgttgtcttgtcggatttaacagctcggacagtgaaggaagagactcttttggtcggagaaacaccgaaaggagcaccggagatgcccttcgggacggcgagacgctgagaaagagaagcggaggagaagctgctccttagctggctcgccattggagatgcactcgctgccattgttctttttgtcttggttac

SEQ ID NO: 690 - DNA, 832 bp, Arabidopsis thaliana
gtgaaactgatgcctttttatcaataacattacttgcacatcaatactgttatggtagacagatgtaaaaaccaaaatcccaatattttagagaaagtacaaaagcaaatcttgaaagcagtaggaaaccgatatactgtagttgtctcttgattttctcaaagatcagcaaagaccgcgaatatgtcaccattgatgtaatcgttctccaccaagcttaccaaatagtagctgttcttcacctcctcgagcaagtttctggaagggtcggcttctgggtacaagttagcccagcttcttgaccaagtctcaaatgcttcatccttccagacgttgaagctagcgggatcgacaatggttggttgaatgatttccttagccgggaaaactccccaagttacagcattcacatcagcttgggcagtgttcgatacccactgttctcctttgttcacagccatgtaagtaatcgatggcaaagctttgcatttctccaccactgcatctaatttctcctttgagcagaagaactctagataagccttttggtatacatatccaacaggacctccccatccaacagttggggaatcagatctctcggcgttgactgatggttggctattgatggtcaagaagcctttggagttgacttttatcagttgctcgtttattatccttgtctctggctggagtccatctaattcagaccagggactgcttttaaggtttccaaggcagagctccttgaatttctcctgaatatcttcaacacttttcagtgggacaacccattcttgttgaagcttcttgtcacgtgctcgcggacgtg

SEQ ID NO: 691 - DNA, 832 bp, Arabidopsis thaliana
gtttgcttcagcggcgcgttcacgtgttcgaccaatcgctcaaaggcgtttagcgtttggatcatccacgtctggtcgcacagctgatccagagatccatgccggtaacgatggagccgatccagctatctatccgagagaccctgaaggtatggatgatgttgcaaaccctaaaacggcggcggaagaaatcgtagacgatactccccgaccgagtttagaagagcaaccgcttgtaccgccgaaatctccacgcgccactgcgcacaagctagagagtactcccgttggtcacccgtcagaacctcatttccaacagaaacgaaaaaactccaccgcttctccgccgtcgcttgattccgtgagctgtgctggtttagacggttcaccatggccgagagacgaaggagaagtggaagagcaaaggcgaagagaagatgaaacagagagtgaccaagagttttacaaacaccacaaagcttctccgttatcggagattgaattcgccgatactcggaaacctattacgcaagctaccgatggaactgcctacccagccgggaaagatgtgatcggatggttaccggagcagctagacacggcggaagaatctttgatgaaagcaacaatgatattcaaacgcaacgcagaacgtggcgatcctgaaacgtttcctcattctagaatcttaagagaaatgagaggcgagtggttttaaactaaagaccacaataaaatgttaagaagtgtctgaataaacttttgtcaattagcttcattgagacattttggttccttacgaaagtgaacaaagcctctttatgtcccaaat

SEQ ID NO: 692 - DNA, 832 bp, Arabidopsis thaliana
gacttgatggtcttcctgaagaagacaaagccaaaatggcctccatgatcgatcagcttcagctccgtgataggttcgtcacttagatcggtttctctgtttttcatttaggattctcccaaaaaaattgacttttagctccttgaaatctttgttcttatagttcaaagctaattagatttgctttagaatattgattcaaggttagtgtgtacttatttctggctaattatagatctttgggtccttatggttcattgataaacaaaagtttggattagagttagtgaaattgttctttaagatgtaactgtgttgtcttattttgtgtgttgttgtcaaaactcacaaaagcttcacataatttaggttgtaacaacttatgcaatgcctattgttgttttgtgtttaggccttaactttggctacttttgttgagttttgtttttggtgaatttcagtttgaggatgtacaattcattggtggagaggtgttttgtggactgtgttgatagcttcacacgcaaatctctgcagaaacaagaggagacttgtgtgatgcgttgcgctgagaagttccttaagcatacgatgcgtgttggtatgcggtttgctgagctcaatcagaacgcaccaacccaagactgatatagtctgcttttttctgtttggtatttcgtacggtttacgagtccgaaaccagaataaaccggttgtttagttgttcaggttactactccgatactgttttttgaacttcttgtactgtgaaattattttgactatatccagttctgatattgatattgatttgtaaaaaaaaaaaaaaaaa

SEQ ID NO: 693 - DNA, 831 bp, Arabidopsis thaliana
  misc_feature (1)...(831): n = A,T,C or G
ttttttttttaaagcagtaggtgaaatcttcgattacagttttaccaaaactatataaaaggtagtttttttctaagttctacgtacaatcacaaaatccatcgacatatcccaaaaaaaaaagcagaacaataacgaaaacggaaaccaaaaaaaaaattcagataatgtttgcccctgcatccagatttgctcagcaaatcaactccaccacgaactttccctctacgccttgccggcaatgttgttggacaaccagtcaagaccttcgtaaagcccctcgcctgaagtggcacatgtgctctggatgtaccagtgacgctgacggagagagtggagaccaagcttatccgtgatctcagctgcattcatagcatttgggagatcctgcttgttagcaaatacgagcagaacagcatcacgcagctcgtcctcattcaacattcggtgcaattcatctctagcctcaacaacacggtctctgtcattgctgtccaccacaaagataagaccttgggtgttctggaagtaatgcctccacaagggacggatcttatcctgaccgccgacatcccacactgtgaaactgatgttcttgtactccacagtctccacattgaacccaatagtgggaatnnnggttacaatctctccgagcttgagcttgtacaaaatggtggtcttaccagcagcatcaagaccaaccatcagaattctcatctccttcttggcaaaaagcctgctaaaaagcttggcgaannncaatcccatcctgcttcacttaactctgcgtgaaagtttcggagctatctgagagagagagagagatcg

SEQ ID NO: 694 - DNA, 831 bp, Arabidopsis thaliana
ccacgcgtccgcctgaatctgacttggttgctaaatcattacaagtcagtcctttcatggatatgcttgggaattggaaaatcagagctaatgaacctggagatgatttatctgtctccattgcatctcaacatcctcatttcggtaactatttctctgcgacattaaaggcgaaaaggatacccctatcgcgggtgtctgatcccgctgttttcttctggttgatgcctcataaggttgcgatatggatctattggcatgcacttcaactctggtggaagagtgtacctttcattcaacacccgagatactcgaacccatcatacagggaggaagcagcgaaacgcgatcaagaacttcgttgccccgggttagatgggtctgattctgataaaaccaacaaatttgatgggttaaaaggagatggttgtagtagtagttttggaggatgtcgctttgcgtggcgagatgcgaactggccttggtcatgaatacatacactctcaagggggtagcagatcatcaagagtttcggaatttacggtcattgtccaatgatatgattggtataaatcatttgaaaatctcgtctcaaatttagttggcttgtttaaaatttggcttgaacacaagtgaaccttgttgattaatagaaaaatcaactttgcattttgattgattcgtttgtaataattctcatctccgaaaatcctaacctctgtttgttgataagtcttcatgtgatcatgtgacttgatttcttgcaagttaaaaatttgtatatatgtatacgaaaaaaaaaaaaaaaaaaaaaaaaaaaaaaaaaaaaaa

SEQ ID NO: 695 - DNA, 830 bp, Arabidopsis thaliana
  misc_feature (1)...(830): n = A,T,C or G
ttttttttaaacgcacaaccaaagaaagcttatttagtaatcagggtatttatctaaagtaatgtgcttccgccgattggaataagcacatagaagagtatatacattacatatatacaaagttgctggggtattgatgctatgctttctatattacacacaaacaattannagactatacataacaaggctaaagactcgatgtcgtatgttaagaagattcttgttgttgacgacgcattcttgcagcccaagacatcgtgttattatctttctgattgcttcttctccttaaccctgagagctgagtttgccattttgctttccactcactcttctcttccaccacttcctgatcgtaacggttccggcgtcgaccggagaaagaaaaagaaaaccccatagacaaatcacggtcatataaaactctccggcgaggatcggagagagtttcgtaagcttcttgaactcgaataaaccgatctgtgtattcttcgacacgatccggaggagaaacatcggggtgatattttcgagcaagttgtttataagcttgtttgatttctgggagtgtgactgattcggtgacgccgagaagatcgtagaaggataagtcttccgattgttttactggatcgtcgtgggttaatcgagattggatccgggtggaggagaatcgggttcgggtcgggtaagagatagttgttgggattgaagttggttgaagagaggagattggttgttgtttgtagaagaatgggtggtgattggttgagagaattgatgagcttttgtaacatttcattgttttgaattttagggtttgttta

SEQ ID NO: 696 - DNA, 830 bp, Arabidopsis thaliana
  misc_feature (1)...(830): n = A,T,C or G
caggcggagaaatcaaaaaaccaaaaatccaatctttggattcttacttctacgatttgtgtgtttcctcaaacccaaatgtctcgtctcccgattttaatcgcttcgtgtctcttcctctcttcactcaccgccgccgtcgtcaccgccgccgaatccgatactccgacggcttattcactcctccaaagctacaacttccccgtcggaatccttccaaaaggagtcgtagcttatgatttagacacaacaacaggcaaattccatgcgtatttcaacgattcatgtagcttcaatcttgttggttcttaccaattgaattacaaatcaacaatcagtggttacatctccgagaacaagctcaagaaattgactggtgttaaagtcaaagttttgttcttgtggcttaacatcgtcgaggttattagaaacggtgacgagatggagttttccgttgggatcacatcggcgaatttcgcgatccaagagtttttggaatcgcctcagtgtggttgtggctttgagtgcaaggattcgaaattggacatgattgagagaatcccttttctttcttcgtcttgaaattgaaaaaggtacaatctttnnttgtaatttgtccccaaaaaatcttacctttcgaaaagatcgcatcnnntatgtattgtccaataatatgagcgtagtnnntggaatttgtaattgtttactttagttctatttattggattcaagttctgtaatggtgaaaagaaaagatactgaagggagatgtgaacattgtgaagtgaacatttgtaatcttagattgaatgttttcatttttgttcaaa

SEQ ID NO: 697 - DNA, 830 bp, Arabidopsis thaliana
ccacgcgtccgaaggctctctctgtctctttctcaaaatcatctgcaggaagtgaatcgtcaaaaccgagtttggaggatctgtcttgagggtttggttttttggatctaggagtttttttttggttgagaaatggcttcgaaacggatcttgaaagagctcaaggatctccagaaggatcctccaacttcctgcagtgctggcccagttgctgaagacatgtttcattggcaagctacaataatgggtccatccgatagtccttattcaggcggagtgtttctcgtaaccatccacttcccaccggattatcctttcaaaccaccaaaggttgcattcaggacaaaagtgttccaccctaatgtcaacagcaacggaagcatttgccttgacattttgaaagaacaatggagtcctgcactgaccatatcgaaggttttgctttcgatatgttcattgttaacggacccaaacccagatgatccattggttccagagattgctcacatgtacaaaaccgatagagcaaagtatgagtctactgcgagaagctggactcagaaatatgcaatgggatgaaagtttgtgtcctttgatccctcaaagactcggttttaatagagagaagagagaaagagagaggacttcttcacatagggatcttccatgaaataagttagattcctatgttttatcatctctttgtttgaaacctctttaatctcaaacaaaaacattccttctcctctttacccatccctatgtttcctatctttgttttctgtgcttttacaaaaaaaaattataagaacaattatttatgtaaaaaa

SEQ ID NO: 698 - DNA, 829 bp, Arabidopsis thaliana
aaataaaaatgaattagaggatatgaaataatgatataacttatgttggtttatgagacaagaagtagctacagaatttatatatagctcgactccttgtaaactactcaactcgagataccgagttctctcctaagtcaactccattattgctgagtcgggtcaaaaccaacacaacacttctctcagtaagatcttttaccatcgtttgatccaaacccaccaaagctgctccttccacttgactgagaagaacggtctgaaccaaatcctcctgaagaaccgcctgaaccaaagcttccgaaaccagatgagcggtctgaaccaccagagtaacggctgcttgatccccctgaacctccataactaccaccaccaccacctgaacggccactgctgccaccataacctccataactaccaccacctgaacggccactgctgctaccgtaactaccatacccaccaccgcctgatcgacctcctccgaacgacccaccagatctagcacctactccttcaaacatgcttgcgcttcctctttccacagcaatgctaggcagctcattgaatctgcttccgacttctttctcaatcattttaacagccctggtttgatcttgaccgtggatgagaatcgcgcttcctttctttccagcacgaccagttcgccccgttcggtgaacaaacgtctccgtgttattaggaagctcataatgaattactaaatcgacattaggtacatcaagtccacgggcagcaacatcagttgcaacaagaatactgaaattcccatccctgaaaccagcaagtgttctttctctctgag

SEQ ID NO: 699 - DNA, 829 bp, Arabidopsis thaliana
gcgcaccgaacagaacagtcagtttaatgggttcgccggataagcaacatcgccgccacgtcgccgccgaatttctccatagcgcggtaacctcaatctcttcctcaatcattcctctcttccctcccaaaacggcgccgtctcgtgtatgcctcccacttagattctcggtatcagacgatgtctcgtcccctttcgaatcgacggtcaagagcacatcatccgcgtcctcctccggccttaattcaacggttaggatatcatctctcagctccgatgggaaacgcggtggacctgctttcgtcggtcaggtgtttagtatgtgtgaccttactgggactggtctaatggctgtttctactcacttcgatattcctttcatctccaagagaacacctgagtggctaaagaaaatgttttcgactatcactaagagcgagaggaatggccctgtgttccgttttttcatggatcttggtgatgcagtttcatatgttaaaaaactaaatattccaagtggagtggttggggcttgtcgacttgatttggcatatgagcatttcaaggagaaacctcacttatttcagtttgttccaaatgagagacaggtgaaggctgccaacaaacttctcaagtcaatgccacagaatggtaaaacacaaaaggtggagggtgtccctgttttcggtgctcaaaacctggacattgctgttgcaactgcagatggaattaagtggtataccccatacttctttgataaagctgtacttgataacattctggaagagtctgtagatcaacatttccatactttaatccaaacccggca

SEQ ID NO: 700 - DNA, 829 bp, Arabidopsis thaliana
caaatccttagcttcctcaaacaaaaactcatgtactctctgcccatctcctttcttgcaactcaagtccgcctccacaattttcaattacaaaccacttacttcctcctccgccacgatcatcacacgcgtcgctgcatcatcctccgattcaggcgagtcaataaccagagagactttccacggcctctgcttcgtcttgaaagacaacatcgacaccgatcaaataatccccgccgagtacggcactctcatcccttcgattccagaagatcgcgagaaactcggctctttcgcgcttaacggcttaccaaaattctacaacgaacgtttcgttgttccaggagagatgaaatcaaagtactcagtcatcatcggcggcgataatttcggttgcggatcttcccgcgaacacgctccagtttgtctcggcgcggcgggagctaaagctgtggtggcggaatcgtacgctaggatctttttcaggaactgtgtagctacaggtgagattttcccgttggaatcggaggttaggatttgcgacgagtgcaaaacaggggatgtggtgacaatcgaacacaaggaagacggtagtagtttgctgatcaatcatacgacgaggaaagaatacaaactgaaaccgctcggtgatgccggtccggtgatcgacgccggtggaatcttcgcttatgcaagaaaagccggcatgattccttctgcttgaatgtaatcggatccataatttatcggttctgagtttaatccggtttggtttatttggttcgagaaccggtactaacgaaataaattattaccaaaccaaaaaaaa

SEQ ID NO: 701 - DNA, 828 bp, Arabidopsis thaliana
ttttttttttttttttttttttaattctaacagacatttattcacttgtactgaattctcgtgaaacgaaataatatttgatcaagaatctgtatcctaggcaactttcgttgttgaaaatcgccaattacactcgtttttgttttcattcaaagtttatgacagggaaaacgatcatactccgccttggcctcctcgttcttttaatggttgaaatgatgaagtaaaccattgcttccaagctgcgtccttctgttgctcgacccatgagaggaaggcactgtctactaggcaaaagatgttgacgtaaagcaactggtattgcacgggaacatatctgaagtttgcaatctgaagaagtggccatgctccgccttcaagagctagagccggaagaaaatctctcttgagtccttctttcacttcagctgtgttctttcctgtggcgaatcccatgtatgtgaagaacaccagtagatctacaggtccaaagataagaccatccattgcaacttttgcagctacaaaacgtgttgactttggtacatatcgaagcttcagttttatgaatttatccaagccttcgtaccaaaagtggccaacaggtccgacaaaaccaaatccaaacatgctcgtgatagctactcgcttccagttgactttgaattctgcatctcgcttccagttgaccttgaattctgcatctgcgtcaacatctttattcgtttcggtgagacgaagaagacgacgtttcgcagtggaatgagtgatgtattgagcggtgacatcgccaaatccccaaagaaatccagaactgcggacgcgtgg

SEQ ID NO: 702 - DNA, 828 bp, Arabidopsis thaliana
  misc_feature (1)...(828): n = A,T,C or G
ttttttttttttttttttttaatcaaaaccaagatatttgcgaacacaataacaaagttctcaactaggaaaaaagtaaaaaacattcaggggatggcgagagaaaagtcttcacaatccgtcataccataagagtattaataaaacaagacaaaattaagatagagagagtagcaaccattgggaaaaaggctagtacgagtcttggtgaagcttaaagcttgtcttcgaactcagatagtggagtcatcgcttccttcaatcccttcctcttcctgatatcagccaccaaaactgaagcctgagtacctggctcaagagggtcagaagacatcatttcccaatgatcaaacacacactgtgggaatgcctgtcctgaggttgctgccctaagctgacttgagaatccgaaagactccacaacaggcaggtatgccttgatgttgtacaagggagttcctggcctctgcatctcctcgaacacgtgtccacgcttctgattcagcacactgtagattcctccaagagctccctctggtgcctggatctcaaccatgtaaaccggctccaaaagtctgggcttagctgtgatctgggaagcgtatatgacccttctggctgtggggataacctgaccacctcctctgtggatggcatcagagtgaagcaccacatcacatacctcaaaacagatacctctcatgttctcttcagcaagaggaccttccttnnncgcccactggaaaccagcaacaactgaatccttgatttcgttaaggtactgaactcccttacacatatcgacaaccatgttaggccctgtggttt

SEQ ID NO: 703 - DNA, 827 bp, Arabidopsis thaliana
  misc_feature (1)...(827): n = A,T,C or G
gaaacatggataggtgtagaaagttatatgaacggtatcttgagtggtctcctgagaattgctatgcttggagcaagtatgctgaactagagaggtctcttgttgaaacagaacgagctagagctatttttgaacttgcaatatcccagccagctcttgacatgcctgagctgctttggaaggcatacattgattttgagatatcagaaggggaattagagaggacaagggctttatatgagcgactcttggaccgtactaagcattacaaggtgtgggttagctttgcaaagtttgaagcttctgctgcggaactagaggaagacgagaatgaagatgaagaccaggaagaagatgttattgaacacaagaaagattgcatcaaacgtgccagagcaattttcgatagagccaacacatattacaaagactccacaccagagctgaaggaagaacgagctacgctcttggaggattggctgaacatggagagtagctttggtaacctcggggatgttagtattgttcaatcgaagcttnnnnngaagctcaagaaaagaaaggcgatcactagagaagacgggtcaacagagtacgaagaatacatcgattatttatacccagaagaatcgcaaacaacgaatctcaagattcttgaagctgcatacaaatggaagaagcagaaggttgctgcttctgaggatgattgagattaagcttttttcttaagttatatcaaaagtcaaaactgtgaaatgtgttttgtattcttccttagctctttgtacacatcgtttggtttagcagtaatttttgttatccaagaa

SEQ ID NO: 704 - DNA, 827 bp, Arabidopsis thaliana
cttttttttttttttttgaatccaaacgagcaaagctgatttaaattgagattaaggaattaccatattgttcggccatatcaaactccaaagtaaaagtttgatgatacaaaagcaggaacttgacaagaggaaaaaaaaaaatactacataaaacatacacacatacaaatttttatgtaaggggccatggttcttaggttaaaactgcggagattgaatcagcgatggagacaatagtcgacggtgagactccacgacttccggacaaataccatctctgcatcattcccaccacattcgcattctccaccttcagtttctcctcttctttaccttccgtctcaaacccgatctcgcaaatgccatctttggctgagaaatggtaagtgataacggagttagctttgaagtacttggactggaaaaagccaacgaccttctcgagctcagtttcttcttcttcctcgtacttatcctcctcagccaaacgatctctcaccgtattctctagctgcactccgtactgagctccttttatctcctttatcaccaccactcttataaccttctccatctccgcggaggcaagggcgtcgaagaagtcatcatcgccggcgagttcttttccggttttgcctttccagttatcaagatgtgttttaacatctgaaggatctaagtaaactccgatcgcagtgaacttcacttgaagaaagtggatctcaatgtctgtgatcccttggcccagaagagagagtggcttggaagtgatgatctgtggaggaaaaggaacctcgtgaaccatgaccatctctgttcccatt

SEQ ID NO: 705 - DNA, 827 bp, Arabidopsis thaliana
  misc_feature (1)...(827): n = A,T,C or G
acaatttggtataggggttccttattatttcacacccaagtatggttacagagaatacataacaatgtaacttaaagttcgtaaattaaatagcttgaggctgctttaattgtttgctttgccccaacttcttgggaaaggaatggcatctttgatatcaggaagcccggtcgcatacagaagcatttgttccatgcttaggcttattcctgaatgtttcactgtcccatgcctccttaaatctaagtaccactcgaacttctcccnngtgaatccggnntccccgatcctcgcatccagaatctcaannnnntcttcgttttggctcccggtgatcacaacaccaacctttggtacgaccagatcaaacgctgctacagtcttcttatcatcattcaaccttacgtaaaactgtttaattgctttcgggtaggtatgtacaattacaggacctttgtagatctcatcagtcagataacttagatgctctgttgttaaagcaactccccactcaggcttggtttcaaattttgtagtggttgccttttgcagaagactaatcacttcggtataggagaatctcaaaagggagctggatgctgttgcttcgagacgtgtggtgatggtcttgtcaactcgttttgatatgaatttcatgtcttcatcgcgattttccagaacatatttgcagaggaacttgaagtattcatcagcacaatccatagcatcatccaattccgcgaaagccatttcggtttccacattccacttctctgccaaatgccttgcattgtcaattttatcagctatgaatcttggtccaaagg

SEQ ID NO: 706 - DNA, 827 bp, Arabidopsis thaliana
tgctcttctcctagttctgaccattgtcccgggcgcagtagctgtgacttacactattgaatggaccactggtgtggactactcaggttgggctaccggaaagactttcagggttggtgacattctagagttcaagtatggttcttcccacacggtggatgtggttgacaaagccggatatgatggctgcgacgcctcctcctcgactgagaaccattccgatggagacaccaaaatcgatcttaagactgtaggaataaactatttcatctgttctacacctggtcactgcagaaccaatggcggcatgaagctagccgttaatgtcgtagccggttctgccggacctccggccactcccacgccaccttcttcaactccgggaactcctaccacaccggaatcacctccgtctggcggatcacccacacccaccacacccacacctggtgcaggttcaacttctcctcctcctccaccaaaggcaagtggtgcgtctaagggagtgatgagttacgttttggtgggagtctcgatggttttgggttatggtttgtggatgtaattggtttagagagccagggtggagtcagtgcttttgcctttttaaattattttggtttttggttgtaagagaatttgggtttgtgtgccacgtcagaagctcttcattattcgtaggatttttattatctcggcatttgattatcgttatcatcatcatcatcacattcacttattctcttgttgtaataaattatactattaattttcattttcgttcatgtggaaccactccatcgttcgtaattaacaatgagagatac

SEQ ID NO: 707 - DNA, 827 bp, Arabidopsis thaliana
tgatgacccaaataggtggctgtatatacgtaacttggactgattcactattagcatacaaatggcctcttagcctctctccttttagaaccttacaggacatttctatcaaacttccatgtttgctatataccacagtttccaaaactaaacatgaaagttttctcttgacatgaatcagtttacactgttgagcaaatcaattgccataagccgatgttgacaccaatgcagattgctatggaggccacagaacttggttgcggtttctgtgaatgaactctgttgtgtgttgttagggttgagatgatgacattgttgaggcaataactggaggcgaatgcagctcgagaaaagcttttccttcggaatagccgcctatacatagagtgtctcctcgaccatgccagataccatcatgaacattgttcatctccagagttttagattcctgagttaatgtacagaatggacatacgagatggtggataaaatcgtccaagaaactatcagtacctctaatattaaacttccttcttatcaacatacggaagaaacccaagtaggatccaatcaaaagaacgaaagcaatagccagatagagaaagcagtgcctcttagttacagcaaaagcaacaacattgaataagaaaccggcaataagaatcatatgaacagcaccctgaagaaagcaagaaccaaaaccagtccttgtcatgtttttcccgaatctgtagcatggacagcaagcagattcgatacagagatgacgatcttcaaagcaatccataacatcgccttcccaaagccgtaaaacgccacggacg

SEQ ID NO: 708 - DNA, 827 bp, Arabidopsis thaliana
  misc_feature (1)...(827): n = A,T,C or G
ctttttttttttttttagaaaaactgtagctcgtattgcgtcacacaaaatatcaagaagagttctcgaactagaattaaatacaccaatcaaaacagtaactgcaaaaatcagcgtcaccgcaatttcactaatcaacatcacatgcttttcagttttcgttatcattatttatctatacgaggatgaaaatataaaaaattacgaagaaatggaacacaacttcgagccccagccattgtttatagaagctttgagcgtggttcctgcctggcacagaggtcgttcgaccactgttgttaccatcatcggatcctgaagtcggagaaatgcttataggtccaggggacgagccagtgggagcagaggctgggccggttttgtttaaacctttagctagctggtagaagacttgggcatctggagaattcggatccaagtgaagcaaagcagggcatttagtgacgtcagcagcggcgtgacaaacagaaggaagtgcgagagctagagagacgttgatctggagacccaaatcaggatcattcctgtcttgaatgatcacacaaagacacttcttgtttgaattaagaacttgtttgagaccggagcaacagtctggcgtcggagattttgcttgtccttgcacgtaaggaagacacgtggccataccgaccnnnnnctccgtacactcctccttgtctttcgtcttatcatcagcagctgccaccaccatagccaccactattaaagctattgctgtcgccattaggttaatcttccgtgactccattttgttttgttatgctgaatttatctttcactgttgt

SEQ ID NO: 709 - DNA, 827 bp, Arabidopsis thaliana
  misc_feature (1)...(827): n = A,T,C or G
actaaacttaattaaaaacaatgataatcattgagtatttcaagaggtgaacactatattacaaagtaaccaatgaaaataacaaagagtcgagtccaaaccaaaaccttagtccaaattggtttctacgacccagtggatataacaatttcataaaattcatagccaccggttaaacctggacccaataccgaactcacacacataactgaaactccagttcacctcctatagccggttcccttctctcacactctcagaaatttccaannaatttctcaccgtttcgttatctacaaatccactataaatacttcactcttcagctttgtattattctcttaacattnnattactcttatccttttaccctcatcatcctccactatttacagttttgccactctgactttatgctagcttcttccggtgactggcgataacacgagagagccttcgccttctccaagcttcatactcttccgacgataaagattagaagacatgaagaacggtaaccggaaaacaacgccggaaacagagaagtctcaccggagaaagttatcagagaaagcgatgtcgtttcacggcagaggaacaacgccgttatcaaatccaggcgagcttcgaagaccgaaaacgttaccggagttattctccaccggtcaaagcatcaccgtaccggagacggtttcacttccgccacgtttgacgaaacttttacttaacgtgacggtacaaggaagtttaggagccgtacaaattataatctcgccggaatccaccgtgagtgatttaatcgacgccgccgttcgtcagtacgttaa

SEQ ID NO: 710 - DNA, 826 bp, Arabidopsis thaliana
ttttttttgaaaagaaactcctttatcacgaattattgtactttactctttcaaactctgtacatttcaaagtttcatatattatagataggtcaataatcccatgaacactaatgtggatcatggtttcttcttctaacttaccagtagttaagagttcaagagaaccaccactagtctttcaagagaagacttctacctgagactcgaactgtggctaccaacacccagaagatggcacacaaagcacccacgattgataatagaagaaaacctctgtttctaatacccttctttgctatggtagtactcactggcgttccattagcctttccattgaacctcatacggctgaagctagacatacgtacaaaggttcggttaaggggaccctcacacgcagaggctggcgttgaaggtattgagtccattaatgcccacaaagccgatgagaactggcttgttgttccaccaccattttggatttcatggccttgggcattcacactcatagtaggattggtggaatcaggcatcacacctgatgagggtgaagcaaatgctccagaaaaggattgttgttgatcaaatagaatggcctgatcatcctcgaaccaaatatcgctagtgatttgattgagagttgtactaggatccatgatgttgttcagctggttctcgggagtctggtcctggaactgttgataaaggagttgctgtttttggtctgatgtgtagttagcagaatcactcagagaagacagatttgcagaagttccctgatcaataggttccatatccaaagacatggaaacgtcatggaaca

SEQ ID NO: 711 - DNA, 826 bp, Arabidopsis thaliana
tttttttttatgtaaaattattagttttaattgaaaaaatcactgaagaagtatacttcgattaaccactaggatacctcgattaacctcaagctgaacacaaaattttgagagtaagaaaacttagaaaaacattgtatggttatatgtggatgacttattctcacatggtgtttagaagaaaccattcaaaaattcaaaaagaagctgaattcttcatgtaaactaccgagccaatggggtcacttcggtaccaaaggtcaagcttacttctatagaaccttctgagtccatgtctcgaatcgctcctccccttgaattttcagatgtcaaacactcgtttaattcaataacaacttgagacatgttcggtcttctagctgatgaaggattaagacaacacatcgctagctcaacagctttccaaacagaagtggaatcataatctccatttagacttggatccattatattttttatgtctccttttgtaagcacttccccaacccattctgctatatgtggcttttcacgtcttgggtctatcacgggttggtttgtgatgatctctaacaatacgactccgaaactataaacatcactcttttcagtcaaccaatttgttctgtagtattcgggatcgagatatccaggagttccagcaacagctgttgaaacatgagtttcaccttcaatcgggaatgatctcgagagcccaaaatcagcaagtttggcatcaaattgttcattcaacaatatatttgttgttttgatgtctctatgcaccattagtggtttgcatccattgtgcaaatactcaagtccg

SEQ ID NO: 712 - DNA, 826 bp, Arabidopsis thaliana
tttttttttttttttttttttttaaaacaaaatgcggttttatttagatacaaacagacttgactcacaatcccacattgactgttggaattcaagattatgctataaaattgaacagtctagtaggagatgatttctatctaagtagagaaatataaaggaacaagcctatcctcagcattctaattggttacagcagaagccatggctaaggtgtacttatgcttaaggtaagctttgatgaaagggtccaagtcaccatccattacagatgtgatatcagaagtttcatgacctgttcggacatccttaacgagtttgtacggatgaaacacgtagttcctgatctgctgtccccattcagctttcactgcatctcctcttatttccttgatttcagtagcacgttgctcctccgcaatcaccatcagtttcgcttttagtctgatcagagctctcgtcttgttcgccagttgacttctctcctctgtgcaacgaacagcaacaccagtagggatatgagtaatccgtacagcagtttcaaccttgttaacattctgtcctcctttcccacctgccctcgtgaaactaatgtcaaggtcctcttctggtatttcgattcccaccgcttcctcaggcaaaagcggcatcacttccacaccagaaaagcttgtctggcgaagacctttcgaattgaaaggcgattgtcggacaatcctatgagttcctttctcccctgaaatgtaaccatatgcataacgcccttcaatttcaagagtcgctgacttaatccctgcctcttctccattagacatttcaacaactt

SEQ ID NO: 713 - DNA, 826 bp, Arabidopsis thaliana
ctttttttttttttttgaagaagagtggaggtttattaagggcacctgtttttggtgaatatattctcaaatattacataatacataatcaaatggtaggattaagaaggcctatagaagaaagggttcttaggccaatctcaaagcccttcaaatgctgtttatatacattgttttgtctcttaaattcttataaattcctcattacctcttttcacatcacgcaacatttcaccactagtccctttgggtctgtcctgccttcctcattaccttccaagggttgagctaacttgcggttctgcgatgacatcatttcttttttaagctgaatcagtagatcctccattgtgaattctcttctccagttggaaagcatagggaagtgactcggatcaaccactccattctcaggattgacacaagccatgtttatacgactctgaaacctcacagtaggtggactttccggataatcctttccacagaatagcttcagctgaaagattttcccttcatacgcagtattatgaggaccaagaatggtaccagtccaagattgcatcaaaatatcatcagcatcatccattccataactcactgtcccatctccaattcctttctcacctctttctagctcttccaataatctaaagtttctgggaacaacgaccctctcttcttccgaacccatttggctgagatgattgtagtgaaattagagagtagtatctgaaggatggattcggctagagaagatgaagaagaacagagaagagagaaagagagagagtctaacagctaacctgcccgggcggccgctcga

SEQ ID NO: 714 - DNA, 826 bp, Arabidopsis thaliana
tggagtataatttcgaatgtgcttttcatcggtgcgtttgttgctgttgccgtcggatccatggttctagtatgtacaggcgtgggtgcgggcgtgggcgttgcagggcttctatcattaccactgattgcgataggatgggtaggcgtccacactattttagagaacaagattcaagctcgagagaaacaggaagaagctctgaagaaagcgcaccgtatagcaaacgaaatggataagggtatggaaaccgacaaagtagatatgaattccatatctggaaaagtccacgcgctaaaaagcaagatcacgtctatgttgaatgctgtgaaggatgctactgaggatggagcaaatgaggtggacacgaaacaagtaatggaaacccttacgggggacgtggtggaattaacagaggatatcaaagcagttggtgatgatgtggcaaaatatagcaaaatgatcgaagagacgagttatcacgttttgcaaaagatcactggttctggaaaataaactttatcgatgtttgatggaatcgaagcaccaaggcgcagaacatcaaacagacgcagagtccaaaaccggagacaattttgtctcatggttttcttggtgtccgtttaattatttcagtttttcttttaagtgtttgagttttcaaaaataagagacgacggtcttcctctcgtcgaggaagctatcttctccactttccattatttcctcgtttgtaggagtcactgactccacttttttcttcttgtaatgttttttttctcttcttgtaatgtttctcactttctctataaaaaaaaagcggccg

SEQ ID NO: 715 - DNA, 824 bp, Arabidopsis thaliana
  misc_feature (1)...(824): n = A,T,C or G
gcgtttattacacaaacgcgaaaaaagcgtcaggaaagattggccccttgcgcactcttgcttttttctggaaacgtctctgaacgaccaactatagatcgtggaaaattcagattccattgcgacgaaaagaaggcggcggattcaaagaacacccaaatacaaatcgaagacggagccttttcagcaatttcgttttattcaacctctggaacaccaatcatctcaaactgattgaatgagaagccctcccccgtctctgctctccctcaccgtcaacgccgccgtcttaaacatctctcgcatcaacgatctctcccatcttcctgatcacatcgtccttgacctcttcgcgaggacattggaagctgggaaattgaatgagagagttctgagactctttatggcatctggaaacgaagaagttctttctgttatcgacgccctcaaaatcaaaatcaacgtttccccgatccttcctactcgatgtgatgagaagtttagattgcacgggactagacgataggcgaaaggtgaatgattacgcgatgagcgagtttgaaaacttgnnnctatgtgtttaaaggtcagttcctgattgcagtattcggatcatttaggtagaaaaaacaatgtgaacaactgcagagatacattaccagattgaagtctgtatttttcttctctttgtgtgtaaatatgaaacgaaggcggtcaaattatatataagcttcttctttcttccgttcttatgaagttttatgcaatcatagaagcttcttgtaaaaaaaaaaaaaaaaaaaaaaaaaaaaaaaaaaaaaaaa

SEQ ID NO: 716 - DNA, 824 bp, Arabidopsis thaliana
  misc_feature (1)...(824): n = A,T,C or G
taacagatgtagcacaacagacgtcaaaagcgatagaagatgctaaaccgattgcttcatcgaccatggatacgatttcttcagctgaccctagtgtcattgttgttgctgctggtgctgcgtttcttgcttaccttcttctccctcctgttttctctgccatctcttttaacttccgtggttacaaaggtgatcttacgccggctcaaacgcttgaccttctttgcaccaagaactacttgatggtggatataagatcagagaaagacaaggagaaagccgggattccacggctcccttcgaatgctaagaaccgcgtgatctccattccattagaagaactaccaaacaaagtaaaaggaatcgtgaggaactctaaacgagttgaagcagagatagcagcattaaagatttcttacctcaagaaaannaacaaaggctccaatatcatcatactggactcgtacacggattcggctaagatagtggcgaaaacgttaaaggttctcgggtacaagaattgctatattgtgacagatggattctctggtggcagaggatggttgcagagccggttaggcactgattcttacaacttctcgtttgcacaagtcttgtctccatcgcggattatcccggcagcttcgagaagctttggcactaggtccggaaccaagttccttcctagctccgactgaaaacagaggatatataaacagtttnnnaagtcttgtttagtattcctttatttctcaactttgagagatcttttgataagattttcgaattattacttacttgtcttttacattgatgatcatata

SEQ ID NO: 717 - DNA, 824 bp, Arabidopsis thaliana
ataagaataaaattgataatagtaacgcacaaagaccaaaaaccaattaatcagaagttttggcacaaaacacagacaaatttaaagtttctcaaagacaacaaacatcattttattcgtattcaacaacattgcttttgcttttaaaagcaaaaaacgcatcactgaacattgaacttttgctttgcgaatgcaacgacctcttcgacggttggcatgtagggcttaacagcttcatgggccctaaacctctcggcccatttgatcaacccaggtgttgtctcttgccggagaaacttgacgccggaaaacgcctcgatcacagagatcggacctaaaagagccgaacaagcaatgtcaaggtagccgatggtctctcctccaaagaaccctaatcctttgctgctcttctgaaacgtttcttcaagtatcgccaaacactccatcagctttcccaccgccgccattttcccttcgtcgtcttttgctccgaccaccgcatccaccgccgcaaaacacttgtcatcgatgtactgagcccaaaaccgagcagatgcgcgatcataggcatcagaaggaaggattgaaggaacggagggccaagcctcgtcgacgtattgaacaacgttgagggactcacagatggagaggtcaccatggaggaggacagggactttcttgtggatggggttagatttgagaaggagttcactcttttctttaagaacatcaggttcgtctaagtactcgtacttgacagatttcaagtgtagagccacacgtgccctaagggaataagggctagaccaagaacctatcagctt

SEQ ID NO: 718 - DNA, 824 bp, Arabidopsis thaliana
ccacgcgtccgaaaataattgtaccgactctctctctctctctctccgtaacaaaaaaatcaccaatggcaaaacaatatctctttgtactcctctcaatctcctatctcttatcactggagctcacggcggccaccgcagcctcacagaccggagcttccaaaaaagccataaacttcatccaatcttcttgcaaaaccaccacataccctgccttatgtgtccactcactctccgtctacgcaaacgacatccaaacaagccctaaacgtttagctgagaccgctatagccgtgacactaagccgagcccaatccacgaagctcttcgtctcgcgtctaacacgtatgaagggtcttaagaagcgcgaggtcgaagccatcaaagattgcgtcgaggagatgaacgataccgttgaccgtttgaccaaatctgttcaagaactgaagttgtgtgggagtgccaaagatcaagaccagtttgcgtaccacatgagtaatgctcagacttggactagtgcggctttgactgacgagaacacttgctccgatgggttctcgggtcgggttatggatgggaggatcaagaactcggttcgggctagaatcatgaacgtgggacatgaaaccagcaacgctttgtccttgattaatgcctttgctaaaacttactaatttaaaactatattttgtcctgtaaaatatatatatagataaatgtaatgtcttgctaagagtttgatgtgatatatttttttcgattttggtagtttctttttgttttgtaacgtggtttataatagtataatgtgtattttgagctaa

SEQ ID NO: 719 - DNA, 823 bp, Arabidopsis thaliana
cttgtacgttatcttcttcttcttcttctctttctcaaaattcgtgtatcttctgggaaattttcagatttagatggagaaaggggttggatttgagaaagacatgaagacagtcagtgatgggtttgtcggaggttttttccctgtctctaccaccaagatcgcgtggaaatcaagaaaaagatcagcattgttgaacctagacaaagcaccggaggctgttacggaggtcacaccagagaagaacgagataacagcaatggataccgagaaagttggggaaccaatgaccacaactcctcttctgtccgagaaaaggaaagctctgttcgagccacttgaacccattacgaacttgaacggaaagcgaccaactgcggctgattcattgttgccaccgccggatttcgagactgcaaactacccaaaaggctggttgatcggtaagaagaggaagcttgtgaatgttgatgtagttgagagcatgcgtagaatagctgtccaagaaatgaacagaaaggatcgagagatagatgggttaaacgagcagctagaagaggattcacggtgcttagagcatctacagcttcagctgctacaagagagaagcaagagaacagagattgaaagagagaacacaatgttgaaagagcaagttgatatgcttgtgaacatgatacaagaagatgacgaagaaggagctgaagaaccctaagctagttctcatcaaatttatgtctcacctataatagctgtgttctgttttttttattcttttgtagatttgtctcgtccacaaaaaaaaaaaaaaaaaaaaaaaaaa

SEQ ID NO: 720 - DNA, 823 bp, Arabidopsis thaliana
gatctcagccactccgctctccctttcggtgccgagatatctcgtgttacccacgcgccgccgtttccacttgccgttagcaactcttgactcatcgcctccagagtcatccgcatcatcatcgattcctacctctattcccgtcaacggaaacacgttacctagttcttacggaactcgcaaagacgacagcccgtttgctcagttctttcgctccaccgaatccaacgttgagaggataatatttgatttccggttcctagcgcttttggcagtaggaggttcgctggctggttcgctactctgctttctcaatgggtgtgtctacatagtggaggcatataaagtctactggactaactgttcaaaaggcatccataccggccaaatggttttacgcctagtcgaagctatcgatgtttatctagctgggactgtgatgttaatatttagtatgggtttgtatggactcttcatcagtcactcgcctcatgatgttccaccggaatccgatcgtgcccttagatcctcttccctctttggtatgtttgcaatgaaggagagaccaaaatggatgaagatcagctcacttgatgagctgaaaaccaaagtgggacatgtcattgttatgattctgctagtgaagatgttcgagagaagcaagatggttactatcgccaccggtctagatttgcttagttattccgtttgcatcttcttgtcctctgcttctctttatatcctccataatctccacaaaggagagacatgaaccaatgtatatgtacagacccaatctatccaatatatgtgtttactctgt

SEQ ID NO: 721 - DNA, 823 bp, Arabidopsis thaliana
  misc_feature (1)...(823): n = A,T,C or G
cgaaaccttaaagaaattccaacttagtttctcaacacaacaaagtcatacacaaaaacaaaggtgcagagatatgaacacaagnnncttttgtggnnttttgtgcccgttaaacaaaatcatttattcaaacaaaagtccaacacgattaaacaagaagaatcaatattccatcctttgcagtagtaaaaagggacttcactaatcacttgaaaagccaaatgatttagttttttttttgtttcttcgaagaaataaagaaagaaaccttcttttagcccgagagagctgcgttgatggcactgtgaacttcaacaccaatctgtgcctctgctttctcaagatctgttgtggcagaagcaagtttctgttggaactcagctaaacccttttggacttggctagggtcaatgtggtcaagcggcacagcttccaccgcgattatgtcagcgacggaatttgcgtggaggaatgcaaaaccactgctcaagaagtatttcttcacgtcagtgccttcatggacggacatgatgccaggttttagctcagcaattgttggaacgtgtccgggcaagacacccatttgtcctgttgatgcgggaatgatgaccatgtcgacctctttcccggtaagctcagatgtgtaagggaggacaaaattgacggtgagcttcgtcgggatagaagaaggagtggaaggacgaggtttcatgaaagcagaaggagtctgcggtgggtccatattcggtgcgactttcttccatgcctcgacgaaagtggaatcgagcgtcgatggaagttccgttgaaaaggcacgagtcgt

SEQ ID NO: 722 - DNA, 822 bp, Arabidopsis thaliana
  misc_feature (1)...(822): n = A,T,C or G
caagccatagacccttcctcatcctcgagtcttcttcttccttttcctcagattttgagctcccaacgcgctcttggtcttgtagctaggccttgtaatccacttcgacgaggattatctaggtctttatcaagtcgacagcttttccgacgatccaaagttgtcaaggcagtagcaaccccagaccccatcttggaagtacctttaactgaggaaaatgtagaaagcgttttggatgaaatccgaccttaccttatgtctgatggtggtaatgtggcattacatgagatcgatggaaatattgtgcgggttaagctgcagggagcatgcggatcatgtccaagttctactatgacaatgaagatgggtattgagcgtcgtctaatggaaaagatccctgaaatagtggctgtagaagctcttccagatgaagagactggccttgaactgaatgaggaaaacattgaaaaggtgctggaagaaatnnnnnnnnacttaatcnnaacagcagatggatcgcttgatctagtggagattgaagatccaatcgtgaagataagaatcacaggacctgcagctggagtcatgacagttcgtgtagcagtcactcagaaactaagagagaaaattccatcaatcgcagctgttcaacttatatagaaacaacaactcttcttgtatgctttgtattagctcccttgtatagtattgttgtgcatagattatgtgttttgttgacatttgctatttgtcctcaaataagttttcaacatttttgttttacttagaaaaaaagtccttattatttaaaaaaaaaaaaaa

SEQ ID NO: 723 - DNA, 822 bp, Arabidopsis thaliana
ctttttttttttttttcacgatgaacaaaatatgattttcatgtttcgaattcacaaaattctttgaagaataacaagagaaatctcagacatagaaaaaaaaaaaaaatcttccaaagctttacaagacataacccgttttggttcatttgttcaacaaacttaactaaatggtcctgaaagatgttgaaattgagtaacacagtgaggacttcatgaactttcctttgctttctttttagtcttcaagctgttttggggcactgcgtctccaaattccagccaagacgctaccgaggattgagtgacagacgctagaaacagcgcacggtactgcagtgagtggattcccaaaatgctgtgtcgcaagaacaactccaagcaccgagttctgcatgccaacttcgatagagatagttctcgatgatgccacatcaattccgagtattcttgaaaacagatacccaaagagaaatccagagatgtgaagaaggcatgaagccaagactacttgtttcccagacatgagtattgcagatgcgttctgaccgatagcatacccacacaggattgcaactgttccaaccgcaattggaggcatcacaggagagacgaatttcaccagctttttaaagtattggttaagaaatgcaccagccaacactgggagaagaaccacctgtagtgttgacattagtaatccaagagcatcaactgtgatatactgcttggcaagcttcgccgtaagaagcggtgtcataatcacagctgaaacagtgctagctgctgtcatcaacactgatagcgcaacatttccacgcg

SEQ ID NO: 724 - DNA, 822 bp, Arabidopsis thaliana
aagaaaaatcaaatgaagaagttagcgagaaaatggcggagaactcgtcgtgacgaagatgatgataagttcgtccttcctacttctgaagacgtcgattctcggcctattgatacgcaagagcaggaggagtacgttcggtatcttgaggaagctcatgctcagcaaagtcttcaatggaggagcgtgtttgtggttcttctgatctgctttggagctttcctcttctactccattttccagcagttcatgtcaccatgggaactgcggtatcatgcctactttatggaagatctcaagtcatggatggtcatttcagctgagtggatcgctatcatggcttgctccctctccattgtcgggctacgagataagaagaatgatcatagacgatggttctggtactcttgtgttgttggatctgcattgaccatcttttggctttattacttgctgaggcttccgaaattccggtgggatgctatctggcttccgtttgggccgctttgtggagctggaatttgtctatacgtggaccatcttctagaggagtcatctgaggaagtgaaaaaactgaggaactatatgtatgcatataaagcacggtagagagataatagctactttcaaacctcgtcagagtgaatttgtgatagcaagagtgcaagttttgactctattatcccctaaagaacattcttctgttgttgtaaatagatacgaaactctgaagttcgttttgtttaaaaactcatgattgactcgaactagattccagttcatacatgtaatactcttgatttattcaagcaattcacttaa

SEQ ID NO: 725 - DNA, 821 bp, Arabidopsis thaliana
  misc_feature (1)...(821): n = A,T,C or G
aattggttatttcaaaatccagaatttctcccaagtctacgccaatagctttgagcatatcctggtgccagtaatgttttgggagtccttggatatcaatccaaaaggggatcttagaggtaaaggtgtcagagattgtaggttcccacttctgaaggatgaccatccattgatcatagtgattccaccggtttgagaggaaagnnnnnnnanaccataatcgttggatagatgggtttgtgaggcgatccattagagttagggaantagcttcgatgaggtctgaagtgtccagttctggtgcacgaattcttctnngaattggtggggatagttctctctctattcatttacctttgagatggtaggggattcttgaactcatgattacagagggcgtaaggtttgaagcggagaggcatcagggataaagtagagattcaaacagtttcagggtttcaaacaggataacagggatacacatgattaaaagtttgaaaagggttacaaaacagaattagagagtaaaagcagagacactaccgggatgcatagagaagatacctccacttctcggtgaggtgaaaacagttgaaaacgccggaaaaaggtcactggaactccatctttgcccgttgatgtaaagccatttttggaaggaactgttggataattctgttttagtaaaaagaggtagctgagatctggtttttcaaaagtttccaactgctaatagactgcattggagaaagtgcctgggagaaaactcaacgctctttttaaccttcagtcaatagcctctgaattcttttcctctgttt

SEQ ID NO: 726 - DNA, 821 bp, Arabidopsis thaliana
  misc_feature (1)...(821): n = A,T,C or G
ccacgcgtccgggatggtgaagtcgttaaccaaaagataggctgaaattttgagaatccattgagaatccatggataagctgaattttttcgaagaaattcgaaaagacgctgaagagacctacaagttaaatccagaagatgcagataatttgatgagatggggagaagctttactagagttatctcagtttcaaaacgttatagattcactgaaaatgattcaagatgccatctcaaaactcgaagatgcaatattgattgacccaatgaaacatgatgcggtttggtgcttggggaatgcatacacttcatacgcgcgtttgactcctgacgacactcaagctagattaaactttggcttagcttatctgttcttcggaatagctgtagctcagcaaccggataatcaagtctaccataaatcactcgaaatggcggacaaggctccacaactacacacggggtttcataaaaaccgcttactctcactattgggtggcgttgaaactttagcaataccgagcccaaaggtagtgaagaataagaaaagtagtgatgagaagtatattgttatgggatgggtgattctagccattggcgttgttgcttgtattagttttcgaaagctaaggtgaatgagcttgttgtgagaatatccacacagaagatatgggcaaaggagaaaaaggtnncaagcgtaagacccctagagcctagggtctctctcttatgtttgatgttttttaagagctttttgtgagtttaaaacaaaagtggtaccatacaattccaagttataaaaacaaaaaaaaaaaaaaa

SEQ ID NO: 727 - DNA, 821 bp, Arabidopsis thaliana
gaaggacctcgccgtggtggagttgccaacggggaatctggtgatgttgaacgcccaccgaggaattatgaccgccatagcaggacaggtcatggtactggcatgaaacgtaatggtggaggtcgtggaaactggggcactactgaagatgatatccctccaacgtctgaggaacctaccacagaggttgagaagagccctgttgctgagaagcaaggaggtgaggatgaaacccctgaagcaaagaaagaactcactgcggaagagaaagcacagaaagaagctgaagaagctgaagccagggagatgactctagaagagtatgagaaaattctggaggagaagaagaaggctctgcaagccacaaaggttgaggaaaggaaagttgacaccaaagtgtttgagtccatgcaacagctctctaacaagaagaacaccgatgaagaaatcttcatcaagctgggatctgacaaggaaaaacgcaaagatgctactgagaaggccaaaaagtcgttgagcattaatgagttcttgaagccggctgatggaaagaggtacaacgggagaggtggaggctcccgcggaagaggaggtcgcggtggtcgtggtgaaggaggaaaccaaaggtatgcaaaagaagctgcagctccggcgattggagacacagctcagttcccttcgttgggctagtaaagacccctggtccttcagcctcgctatctctgtctttcgtttctctttggttgaattttgttagttttataattttttgttacactttctgaaggtcttttctgcgaaactattacgttttgcggccg

SEQ ID NO: 728 - DNA, 821 bp, Arabidopsis thaliana
ccacgcgtccggtgaatgatcctaatccgtttagctttttaaaaaataagaagacatatttatcaacttgagcaagttgcagcagatattttcctcggccaagatctagagttttgagaatggcgatggtatcaggaagacgatctactctaaaccccgacgcacctctttttattccggcagctgtacgacaagtggaagatttctcaccggagtggtggcaattggtgacaacttcgacttggtaccctgattactggatcagtcagcagcagcaaggcgcggatggtttctatgacaacggagagaatgagaatggtggaggtcatatcgatgtagctgatcttcttccagaatcatttgattttgatgatatggaagatttctttgacactgatgctgctgagtttgatcaaggattcgatggaagaatgtattaccaagcaccttccgaatttggctttggaaagaatggtgagatggttaagaaatcaagtggaaacaggagcccgagatcgattgtggaaccagctaagtatgcggaaaagccagcgaaatggggaaaccagagggttgctgctgctccgagaaacatccaccagcctcgctgaagagatatgttgttaactagtcagagaagtcagagcagttcggtctgtgtatctttagccaccactgtacctttgtaatttttagtatttgcttccacaacaaaaatctgtaactttgtatctttatgatgttcattctcaaacttgctatcacaaaaatgtaaaaacataaaaaaaaaaaaaatgtaaactttgaagagaaatgagaac

SEQ ID NO: 729 - DNA, 820 bp, Arabidopsis thaliana
  misc_feature (1)...(820): n = A,T,C or G
ccacgcgtccgtgaagctaagattttgagctgggaatgggctttaaaaagtatgaatagtttacatatggagaaagtgacttttgctgcatccactatgaacatcattaaagctattcacaagcctactgaatggccattgattttaagtcacattgctcctctccttgtcttaggcagtggaaaacaggattggtttgttctgtttgagcctacacaaaatgcaatactggagctttttttattgcaaaaagtgtgacattagatctcaggttgagttcttatgttgctcgccacgctcctagatggttagcaggtttttttgaacacgaaaagagtttgcttttaaatccttcaatctaatcctttccttctagagataggtctggtcttctctgnnaagtgtcaaggataggttcagtcttttctttttaggtaataaatctccactgttcagataagttagtggacacattttgagttacttttgtcaagatgatgttaacaggaagatcggcataaacaagcttggtgatcttcaggtgactaccttttggggttatgctgctactatnnntcgaaaggaggatatgatgatatatacaggtcgttcacaacaaatgcaaaagttggatgctctaagatcatgtccaattctcttgattggaactatgctcttattgaggacgttatgaagactgtttcaaagttatcattttatttcttttggctttggtagttgaatgtgttgtaacttctgtttggtttgcaattaacgtaagaaaggctgtttgtataaggtttttgccttttcaccatgg

SEQ ID NO: 730 - DNA, 820 bp, Arabidopsis thaliana
  misc_feature (1)...(820): n = A,T,C or G
catccgtttttataatttaattttcttacaaaggtaggaccaacatttgtgatctataaatcttcctactacgttatatagagacccttcgacataacacttaactcgtttatatatttgttttacttgttttgcacatacacacaaaaataaanaagactttatatttatttactttttaatcacacggattagctccggcgaagtatggtcgtcgtcttcatcttcttcctccatcatcagatttttccttaaatggaagaaaccaaacgaaactccgatcttctccgttctcgtgttttcctctctggcttttattgctgggattgggaatttctcaccgctctcttgctttttagttgctgattctttttccttcgactttctatttccaatctttcttcttctctttgtgtattagattatttttagttttatttttctgtggtaaaataaaaaaagttcgccggagatgacggctgtgacggcggcgcaaagatcagttccggcgccgtttttaagcaaaacgtatcagctagttgatgatcatagcacagacgacgtcgtttcatggaacgaagaaggaacagcttttgtcgtgtggaaaacagcagagtttgctaaagatcttcttcctcaatacttcaagcataataatttctcaagcttcattcgtcagctcaacacttacgtgagtttcactctaacgaaaactcatttactctcaatttaatgcttcatttaattcgtttggtgaattgaatcattcttttgtagttggttagccaatttcgtaattttctcataatttgggggttgg

SEQ ID NO: 731 - DNA, 820 bp, Arabidopsis thaliana
tataacgcgaaatgagatgcaattcttttatgaagagcagttgcatagaatggagtgcatggcgcaagaggctgttcttttcgaggatatcttatgtcagatgattgatatgatcggacctgagaacgaaagccatataacgctgcatgacctgaaaggctcaaagctctctggaaacgtcttcaacatcctttttaatctaaacaaatttatggcatttgaaacccgggatccgttcctcattcgtcaggagcgcgagaacccgacattgacagactgggaccgttttgcacatagagagtatattcggctatcaatggaagaagatgttgaagatgcatccaatggaagtgctgaggtttgggatgactcgtcactggaggctcccttctgagttcaaagaggtagcaagtcaacaaaagaaaatcataatctctagaatggattttattttttaaaaaaggaaacaaaaaaacttagaagttgaaggttatggatatgttgttatttcatcatattagttaatcatgcaaaagagaaacagaaagtccctgagaagaatctttggagctttgttgagaaggcaagtgaaaaaacaagggagaagccagtagtatcatacttagcttggagttgttttctaacttctcttcatttttagctgattttacaactatattgattaataatcgtcgtcgtttagctcatcgctttacggcttcttcatctgtattgcattcactttgctccatctctgggttttttgtttgtactttagagctttgttactctcatgatcttcagttgttcaaaaattgtg

SEQ ID NO: 732 - DNA, 820 bp, Arabidopsis thaliana
  misc_feature (1)...(820): n = A,T,C or G
tgtcgatcttcgagtacaatggaagtgctgttgttgctatggtaggtaagaattgtttcgccatcgccagtgatcggagactcggtgttcagctacagacaatcgccactgatttccagagaatctccaagatccacgatcgtgtcttcatcggtctttctggtctcgccaccgatgttcaaacactataccagcgcttggtgtttcgtcataagctttaccagcttagggaagagagagacatgaagcctgaaactttcgctagtcttgtctcagccattctttannngaagagatttggtccttacttatgccaacctgtgattgctggcttgggagatgatgacaagcctttcatttgcacgatggactctatcggagccaaagagttagctaaagattttgttgtatctggaactgcttcagaatcactctatggagcttgtgaggcaatgtacaagccagatatggaagctgaggaattgttcgagacaatatcgcaagcacttctctcatctgttgaccgtgattgtctgagtggttggggagggcatgtttacattgtaacaccaacagagattaaggagaggatcctaaagggaaggatggattgatctgcttcttctattcaagttgttttccgctgtaatccggttttaagtagtgtaaccttcacatcccggtttaattatatgatcattccttggctgaaattatgggttatgtatgaagtttgattttcctcttggataatggattatatgattttaattcgtagagttatcgaagaataacacttttaactaaaaaaaaaaaaaaa

SEQ ID NO: 733 - DNA, 820 bp, Arabidopsis thaliana
ttctggcgcggagcggccgcccgggcaggtcgattctctctcttgagttgaagaaatgaagcacaacaatgttatccccaatggtcacttcaaaaagcactggcagaattatgtcaagacatggttcaaccagcctgccaggaaaaccagaagaagaattgcgaggcaaaagaaggctgtgaagatcttccctcgtccaacttctggacctctccgccctgttgtgcatggtcagactcttaagtacaacatgaaggtcagaaccggtaaaggattcactcttgaagagctcaaggctgctggtatcccaaagaagttggcgcctacaattggtattgctgttgaccatcgtcgcaagaaccgatctttggagggtcttcaaacaaatgtccagaggctgaaaacctacaagaccaagttagtcattttcccgcgtcgtgcccgcaaggtcaaggctggtgactctacaccagaagagttggctaatgctacccaagttcaaggagactacttgcctattgtacgtgagaagcctaccatggaactcgtcaagctgacttcagaaatgaagtctttcaaggcttttgacaagatacgccttgagcgcactaacaagaggcatgccggagctagagccaagagagccgcagaggctgagaaagaagagaagaagtgaggtcgttcttcttaggtagaagaaacttttatcttatcaacttttggaactgaattttgtgtatcagactgtcttttctttcatcagtttttatccttaaatctttgattttgctgctaccttgcttctcttgatttatggaaa

SEQ ID NO: 734 - DNA, 819 bp, Arabidopsis thaliana
  misc_feature (1)...(819): n = A,T,C or G
aacttcatctttaaaatgttgtggataatcagcaaatgttgtcatatgattatcttctagtaagacaattgtacaaatccatgtaaaatggagttatctactcagaagaagggaaaacagatttgtcaccgagaaatgtcgaaaacttgggagccaattagcatgctctcctttctgccagagtgttggtaatgtcgaatccaagagttattacataagctttagtccacctgttacttcatcaacattatcaacaggtccaagaatagccattactgtccttgaatttggagcgatctgtgtttttcccgcatcaatggtgatatgggttggcagtttcagggtctttgctctttcttgcaaaactagcatctcttcctcactttcaattttgacaacaacttnnngctgagcacaatattcccatctgttcaaggcnnttggcgcccgttgaaggagtttnntgtataaacctaaagttgcatgactgcattgagctgcaatcttccctttacccattttaagatcattcctcacaaccaaaaccattttgaaatttttgcgaaaatcagcgagtttctctatctcgaggggttccttggacttggttttcttattcccgctggatcctgcatctatggcgacagatttggaggagagaaagattcggcgggtttgtcgtaaagtgctgatgtaatatccnnntgcagctccaacaagtaaaacacttaataaccacaccaaatccatacctccttaaagtcttccggcggctgagctgtgacaagtctgtttcttcgttcaagtttcaacgatttt

SEQ ID NO: 735 - DNA, 819 bp, Arabidopsis thaliana
ttacatcgtttaatagttaactaattaaatctcttataatcacatagcaatgtcattacgaatgtgacggaggataacgggaataacagaatccggtgagctaagctgaggaagatgaccatcagaaggaataacctcgacgacggattcacagccaagattggcgtgaagatactcggagacaacgactggtacagctaagtccttaacactttggagaatgtgacacggaacagtgacaaaaggtaagatctgtctcatgtcactttggaaaatggtctggccgacggagagagctatgtcgggacgcatattgaagagtgttctgctgaattcttgaacggcgatggagtccatgtcgccaccgacggcgagtggagcgaaacctaagcaccacgctttgtagttgcttcggatggcttcgaatagttggtttaagtcttcttgttcgaatccaccttggtaatcaacatcgtttacgtatctcggagaagcagagatcatgacgattttggagaagagatcaggacggttaagagaagccaagacaccaatcatggcagaaacagagtggccaacaaagatacaagactcaatcttgagatcttccaagattgcaatcaaatcgaaagagtagccttcgagatttgagtaacgatcgaagtcgaaatagtcagggttggtcgtaccggctcccatgttgtcgtagaggacgacgcggtaatcgtcgaccagatgtggaaccaagtgtttccatactgactggtccgtgccgaacccgtgacctaacacgatcgtggcttctcctgaaccaatcac

SEQ ID NO: 736 - DNA, 819 bp, Arabidopsis thaliana
  misc_feature (1)...(819): n = A,T,C or G
gaaaccgcttcaaggatggtgagtgaaggagcaacaagaaaagaacttaacctctgtttcgagaatatgaagatggaaggagttttgatctctgagtggaaagatatccctgtggagcttctcatgaagattttaaaccttgttgatgatcggactgtgatcattgcttcttgtatttgtagtggctggagagatgctgtttcccttggcctcactcgcctctccctctcttggtgcaagaagaatatgaacagtttggttctatctcttgctcccaaattcgtaaagcttcagactttagtactgcgacaggacaaaccgcagcttgaggacaacgcggtggaagccatagcaaatcactgtcatgagctacaagatttggacttaagcaaaagctcgaaaatcactgaccattccctatattcacttgctcgtggttgtactaacctgactaaactcaaccttagcggctgcacttcgttcagcgacactgctcttgcgcatttgacaagattttgcaggaagctcaaaattctgaatctttgtggttgtgttgaagctgtatctgacaatacattgcaggctattggagaaaactgcaatcagttgcagtcactaaacttgggatggtgtgagaatataagtgatgatggagttatgagtttagcttatggttgtcctgatttaagaactcttgatctttgtagctgtgttctaatcacagatgagagtgttgtggctttggcgaatcggtgcattcantngnggtcattgggcttatactactgcagaaacattacagacagagcaatgtacctc

SEQ ID NO: 737 - DNA, 819 bp, Arabidopsis thaliana
gcggccgcctctttttcgccaatgttttctttagatctagctaatatggcgacgattttgttctttctcgcttctaatcaccgtagagatcctcccgatctgcaaatccgatccgaattctcaacgaatttgtagatctgatctgtgattccatcgttgacgacggatcttcgcttacatcgtttgatctgtcgcagatctgccgttttctatagatctagatctggatcgtccttcgcggcttcttcacatgcaagattctgtgaattgttcaagttgaggcatcatttctggattactaggagacgaatctgttgcagacggatgtgtgtgtgttggattgaattgagattagggtgtagaagatgttttgtggatagctaatagcttcctgattgcatctctgtcatccgacctttgccatgtcaggtgcgcttgcatggcaggtcaaaaaactgatcctcaataaaaaaaagattttgtgggttttggagaggaggtcgcacgggttattattttttcccgggatctcttctcctctgtgtgtgtcgtcttgcctctgctctatctctctccctgctctttcacatttcatatctttcttaaatgctcatatacactcaaaaaccgatcataagcagagtttgtaaccaatatggagcagtgggcgattacaaatcttcttgcccaacaacctcgagagttaaatcaggtactcatatccatattaaatcgaattcttaattagcataataaggtaaacataatctgcaagaggaattctggatttaaataaaccataatccggttgccctaatt

SEQ ID NO: 738 - DNA, 818 bp, Arabidopsis thaliana
ttaaaaagactagaaaaagggatcaaccaaaccaaaccaaaaaaaaaagtaaccatctttctcctaaatctctacaatggctcgatctttatctccatcactttctctctctcggtgccgtttcgccgcagcttctcttcttctcccttcatctcaaaccattttcatccgatctcaatcctcgaatcgtcggtctaactctaaccatctcggagtaatctacgagattgatatcgctgcggatcctcttgtcaataagttggaagatgctgtccaccggattatggtacgccgatccgcacctgattggctcccttttgttcccggtgcttccttttgggttccacctcctagatcccagtctcatgggatcgctaagctcgttgagaagctggccaatccgatctctgatgaagaatctatttcaatctcatcggttcgaggatggccttgctctgattacttcatcaaaggtgtaaagcctcaatcagttgagacggagatgacttcaaatactgcatatcactccgaggacgaggaataaaccccaaaactcgtcagggctcttgctcttcaagatttgtagatttatgaacacgaatcaacgaagattcgaatcaccaagagcagctgcaaagacatggtttagacttttagataaggtagagtaaagcaaaccttttacagactgatcagatcctatccagtcttagtgaaattaaataaggaaaaggtgctgttgctttgccctctgttttcttgtaatctcccttataacagtttgttgaatcgtgtgtatatatatttccgcataagct

SEQ ID NO: 739 - DNA, 818 bp, Arabidopsis thaliana
  misc_feature (1)...(818): n = A,T,C or G
tgtttatttcatttgacgaactggtccagtattacacttcacacgttttatcttnaatacagagnntactgaaatgtaaaannaactaatactagaaagccatnnnnnatgggcagctacgagatgtcgagatctcagttccttgtactgtttttcaaccattctaaatacttgtcgctcccaccagtgatgggcaacgcaattacttctggcacactaaaggtaacaagtaaaccatatttattaacttagcttgtgtgattgctaaagaaaaggcaagacactcgcattactcatgtttttatatgcagaatacgtcatagaacaatgcttactcgtattcgtgatttgcattgacatgctcggttagaggttctagaagggattgccttgttttgattatcaggagctcctctgaatcactctgaaccttcccctcccactcgtacaccgattcaatgccaggcacaatgttcacacacgctgcaagcttttcctggacaatgctgttagccaacttcttccctgcttctctgttaggaacagtgacatagacaacaatgctgggcacagttttgctgctctcctccattctgatcgacgaagaaaaagccttactgctaaacttagaccttaagagaggaacaacagagaaagactgtgcacaacccgatttgaagggagatgaagaagaaagagaagagattgagagagttgacagaacgcaaaacgctccgacgatcggaaaactccgtcgagatccgattaccgccgataatctagtggtgagagacgaagccatcactgtgtacggacgc

SEQ ID NO: 740 - DNA, 818 bp, Arabidopsis thaliana
  misc_feature (1)...(818): n = A,T,C or G
gggcaggtactctcccggacagccgggagtttgatcacatagataaccctcagtttgaaggttacaagtttgatccaaatggtgaatacgtaaggcgatggcttcctgaactctctagactcccgacagactggatacatcatccgtggaacgcacctgagtccgttcttcaagctgctggtatcgagcttggatcaaactatcctctaccaattgtaggattagatgaagcaaaagcacggcttcatgaagcgctttcacagatgtggcaactagaagctgcttcaagagctgcaatagagaacggatcngaagaaggacttggagattctgctgaggtagaggaagctcctatagagttcccaagggacattacaatggaagagnnngaaccaaccagactcaacccaaacaggagatatgaggatcagatggttccaagcattacttcttctttgatcagacctgaagaagacgaagagtcgtctcttaatttgagaaattcagtaggagatagcagagcagaggttccaaggaacatggttaacaccaaccaagctcagcagcggagagcagaaccggcttcaaaccaagtcactgctatgattccagaatttaatatcagaattgttgcagagagcactgaagactcaacagcggaatcttccagcagcggaaggagagaaagaagcggaggcatagtccccgagtggtctccagggtactcagagcagttccctagtgaagaaaatggtattggaggaggaagtacaacgtctagctacttgcagaatcaccatgaaatactgaactggaga

SEQ ID NO: 741 - DNA, 818 bp, Arabidopsis thaliana
ttttttttttgatttaatgaaattatttgataattattaacaacataacctaaaacttaaccaatgaacaattagaataatctaaaaccctatacaatgaaatgttaaagacaagtttatgttattcccctttttgtacaagcttccaagtcttatgaacataaaaagcaaacgcaaatttcgtgcgtttttgtttccttgatgtcaaacgtagtttcttgccaaccaaaccacataagtcagcaagctagctgagatcgatatccactttttccggtacacacctttctttttggttcttaccaagctctgttccaagctgaccctgatcgcctgcaccaaacgcgaatagcttccccgattccgtgagcgcaaatgtatgagcgttccagtatatggagttcgttagacttatctggaccatccgctcgttcacttgttttagcgatgttactaccgttggacttagcacgtttgcatgtcgattaccctgttcatcaaaggatggatggtgaccgagactagcggattcgccgcagccaaacgagtaaacatcaccatcgtctgagaccacaaaagtagtgtagtctcctgttgcgacatgaactgctttgacatggcttagaccttcaacaaccttagggactgattcacactcctcgttaccgtgacctaaacatccatatcttccccaaccccaagtgcacactcttccatcctgacctaccaccgcggcatgccaagcacccgctgcaactaccctaggttgaagattcaatatctgaaactgctcgatgacccgaggatacttctcatct

SEQ ID NO: 742 - DNA, 817 bp, Arabidopsis thaliana
taaaaaatttctttcatttgaaataataaaagtaacaacaaaaggattacaaattttttctaattggtataaagattacatcgttaaaaatgtcgaagcattttaatcaaacatcagcaaaaacatggaagttcttggagtcaacagagatgagtctaacagcagcaatagcagcagcaagagacattaatccaaagaagcaaacattgagccaatgccatagcttttgcacaagactaagctcatcattcatagcaacaagatacatgtgattcgctaatatgaatgtgagagggaacgtgcttatcgctccggtaaggctcatgaaatctccgggaaacggtaaaagcgcagagagaagagtgctcaccgcaatgtagcttcctcttgctactgttctaaacaacagattcttcattgccaatggacttcctttgactccatactttgtgtccatatactcataagtcggacttgcaaaaatatgtaaagagataacagattggagaaaagctgaaatgttagcgagtgctttgacccaaacaggtccactgacgctgtttaagagataagtcgatgtcgaggacccgtaagcccaatatccgatgaatgtaaccgcgtacataggtaaaacaccaacagtgaattgaaaatacagagccttcatcatgtttttaacgaccggttgcttcaccgtggcctgtatttccgggagcattcccgtgttgaatgcgaaaactagatttgcagctgctcctgttatggtaaagagtttgtttattgatgatccttgtatgttgtaatctctttcaggctt

SEQ ID NO: 743 - DNA, 817 bp, Arabidopsis thaliana
  misc_feature (1)...(817): n = A,T,C or G
ctttttttttttttttaaaaaaaactaaagtatacattgcatcataatataaatgctacaaaacattagagacacttgttttcttcttacattgatacatttctatgatttnnnccacaaattgagctctatcctcgaattctcctattagcttggcaactttatctatctccggcaccacattcttcactgtttcatctgacaaannncggttggcccatctataaagagaaggagttttnnattcgtctanaatnnnnncttttttaagcttctctctagctttcaagaaaaccaaaaagcttccaaggcaaatgtctatgaacccgattgtttcaccgccgaaaaaagattttcctttgcttagagcaataaacgcagcttcgagttgcaacaacccttcttccacttcttccatgccttttgcttttgcgtcttccgatttagcgaccacagctgccatcaaagccggaaaccacttgtcatcaacgaaggcagaccagaagcgagcaagggcacgatcatgaggatgagaaggaagaatgaacgatccagatgagttccacgtctcgtctatgtattcaacgatgtttagagactcacaaaccgatttattactgtggatgagaaccggcactttcttgtaaaccgggttcgatttgagaagaagctcactcttagatccgaacaagttctcttcaacgtaatcataatcaaccgatttgagacgaagagcgatctttactcttatcacgaccggactgtaccatgttcccaacagtttcacctctctctctaccatctttgttttgtctaa

SEQ ID NO: 744 - DNA, 817 bp, Arabidopsis thaliana
aacccacatgatatcttttttttttgtctcatattttattgaaagaacaaaccatacataaatgggctaaaacaaaccacagcccacacttaaattttacaagattaagtaaagcccaagatcacattatattgaagaagagttggcatcttgtctccatccaaacgcaacgtgtcagtagtgaaatacaaatcagacatgtggggatgagtaacctaaaggattccgattcagcctccgccgtacgagctcgattctggtgaaagagtcaccgtcgatacaaaaatcgaaacatgaatctttgagttttcaccagaaataggacaatcgaaactccaaactgaaatatagcagctaaaggaattgtgtaatatgcttcgaaatcttcttcttctcttcaattataaactgcaaatcttaataataattcctgtaaaaccaagcttcaaacaacatgagtcggataatcaacagtttaagcaacatagcacctaaatcgttatcaccaacacataattgctgaaattattgaaaggaaaacaaagaccaaaaggtgagagtaactcatctatggccaaagtaaaactaaaatccgaccaacaccgctgatggagccgtatgctgtcgggaaaagagtcggccatcttcactgaagaagctggaggtgccgaacgagagcccgattaaaacgggacgtaagagccgaacatcgctgctgtgaaagtcagacgatttcggagtagagccgaccaatcaacgctaaaaaagccattgatgtcggaacagatctgtgaaatcacttttcttctcgcggccg

SEQ ID NO: 745 - DNA, 817 bp, Arabidopsis thaliana
tgaaggagacatcatcgaggctattgaggatcagagggattcagacttttacgcttcctgatcttccttacgattatggcgcattggaaccggccattagtggagagatcatgcagattcatcaccagaagcatcaccaggcttatgttactaattacaataatgctcttgagcagcttgatcaagctgtgaacaagggagatgcttccactgttgttaagttgcagagcgccatcaaattcaacggcggaggtcatgtcaaccattcgattttctggaagaaccttgctccttccagtgaaggtggtggagagccaccaaaaggatctcttggtagtgccattgacgctcactttggctcccttgaaggtctggtgaaaaagatgagtgctgagggtgctgcagtgcaaggctcaggatgggtgtggctcggactagacaaagaactgaagaagctagttgttgacacaactgccaatcaggatccattagtgacaaaaggaggaagcttggtacctctggtgggtatagatgtttgggagcacgcctactacttgcagtacaaaaatgtgaggcctgagtatctgaagaatgtatggaaagtgatcaactggaaatatgcaagcgaggtttatgagaaggaaaacaactgaatcgtttacacgatgacataaggagatgaaccagttccagctcagcttttgttttaaggttgtctgaaacaaacttacagtgtctctttggtttttaagatttgctcaactcagctgtgtggtacgttgttttacaatgaaagttttcaagaataaaaaaaaaa

SEQ ID NO: 746 - DNA, 816 bp, Arabidopsis thaliana
  misc_feature (1)...(816): n = A,T,C or G
ttttttttttttttttttctccataaacccgttaaaatcatcgttatctctagtcgaaaccatgacaaaagcataaacatcccaagcctacacataaatacaaagtatcataaagaaacaaatcacccactaggacaaaaaagaaaatacatgacaaaaccttattaaggaccgaattttaatttattagccgaatattctatgacttatgcctagccgcgaaccggtttacaagagccaatgcattactagtaactcgagccacatgaaccactcttcttctaatcgctgatttgaccacaccgtccataacctttccatcgaaaccatccagacacgttgtctcatccgttaaggcagcactaacccaagtctcaacgttacttagtctccacaagaactcgtctcgatcacgaccagatcgaccaacttgcttcaactccctcatcgactgagccaacatctctaaaccgtctccaagattttcaacacaatccttcacggctaagtactctctccttttgattctcctagctttagtcagcttccctacatagattgtcgtggactgaacccggactagagtaacggctaaagcggtttgagctaactggttttcgttgcnnnggattttgtctgcaaaagcggcaaggcatttgacgcagagagtttggtaacgcgtgannnggcatgatgagacaatgaagttgatgctgctgctagggtttggtgatgatgaaggtttggctatggtggattggcagagtagtggaagaaaaagtagaaggcaataacaaagatgggttagctttggtt

SEQ ID NO: 747 - DNA, 816 bp, Arabidopsis thaliana
  misc_feature (1)...(816): n = A,T,C or G
cgtccgaaagagcgaaaaggtgctctatttgatgaatgggagttctcagaagcaggtgtggctgagcagtctgagcctatggatcagaaacatgttccatcagagcaagatcaaagctcaatgctaaaagttatctgcagccaaagagatcggttccgagcacgattacgggaaacagaagaggaaataaggcgattaaaagagaagataggttttctcacagacgaattggagaagaccaaagcagacaacgtcaaactctatgggaaaatccgttatgtccaagactataaccatgataaagttgtttcccgaggatcgaaaaagtatgtggaagatcttgaaagtggattcagctcggatgtcgaatcaaaatacaagaaaatttacgaagatgacatcaacccttttgcagcattctcgaaaaaggaaagagagcaacggatcaaagatttgggaatcagagatcggattacgctaagcagtgggcggttccttctaggaaacaaatacgcaaggacatttgctttcttctacacaataggattgcacgtccttgtcttcacttgtctctaccgtatgtctgcttacagttatctcagccatggagcagaggagactctaatgacagaagcaaccacaaaccttnnnnncggtctttaagctctcaccctagggacttattcgtttttggtcgttatgttctttcttgtccttgtagtgttccgtgggcaattctaaaacggttgaatatttgtacagagggatccaaatcactcgatacatatataaagccacagaaaaaacttccttcag

SEQ ID NO: 748 - DNA, 816 bp, Arabidopsis thaliana
  misc_feature (1)...(816): n = A,T,C or G
gtcacctttattttatcccacattttttctaattagaccataagtcatttttttggtttccgtttgattgatgaattcaacatttttgttgtatatgttccacgattttgcaatgttcttctcaatcgaagctaaagggattatatagacaattattgtgtgtgtttgaatataggacgcagatataatgtggcttagagatccatttcctcggttatatccagatggagacttccaaatggcgtgtgacagattctttggaaatccttatgattcagacaattgggtcaatggtggtttcacatacgtgagatcaaacaatcgaagcattgagttttacaaattttggcacaaatctcgtctagattatccagacttgcatgatcaagatgtgttcaacagaatcaagcatgagccttttatctcagagattggaatccaaatgagattctttgatacagtttactttggtgggttttgtcaaacgagcagagacataaacttggtttgcacaatgcannntaattgttgtattggtttggacaagaagcttcatgatctgaatcttgcccttgatgattggagaaagnnnctgtctttgtcagnnncagtgcagaacacgacgtggagtgnnnctatgaagtgtttggaagattgagattcncttctttctttgttttgttgagatttggatgaaaagtatatttaaaaatgaagagtttattgttcgtgcaaggaatattctttagctctctaatctaatcaaatattttttttgatggttaaaaaaaaaaaaaaaaaaaaaaaaaaaaaaaa

SEQ ID NO: 749 - DNA, 816 bp, Arabidopsis thaliana
ttaaacaatagaaaaatttggaggctcgagaaagagtgatgagagttggttggagaaaacatgatttgccttttgtacaactggttttcaaacccacagggactatggatattaaaaggataacaaaaaaaaaagaacaaaagattaaactaaaattaagattagagaagacatcatcatttgcaagtccaagtcccaaaccttctagctcaaagagagtctcttcacgttccacattccatcttagttactcccccactgtttgtgaccaggaacccatttaggacacttggggctgaagtaactatcaacaacccttgagttcaatagctcgataattggagcaaacttcacgcatctcggcgtcttatactgattaatcgatgctcccaagctgattgcgtaatccatgagcttatcgaatgtccctggctcaacaatcttgatctcaagcgggcctatggacttgtcactaacccttccttgtctataaacagtgttgaatgactcttctacagctaagcagcagtcctcgaagaccgaaggagggatcggtgtgtttccatccaaacatagctcccaaaacaggacataatggcctgggatggaacttgtgtctgcatagctcgtgtactcagagagtgaggcatcaaatgggacaaggtgtgtcactgcgttcttcaccgcgttctgaagctcaacctcgtcggtcttgtcggaatctatgctcaagaccacatttttgcgacatatgaaactgaattgaggcgctttgttcttgaaaccagtcactctcaataaatcaccaactctgta

SEQ ID NO: 750 - DNA, 815 bp, Arabidopsis thaliana
cttttttttttttttttttttttggaagtcataggtgatacaagaagaaatggtacagcaagaaaacataatggtcatattagtcatgacaaaaaacacttgggtttaagctttttgttatgacttgcaaggacactcaacaatagccacgcgaaagaaaaataatccaaaagaaaaaaaaagagttgaagagagaatatgagacaagaagagctaatacacatccacttcaataattcattcaccattgtcaaacggttacagctttctacaacttcagctcgatcacgacttacacatcatgcttcactgctgttgctgctggtatccaccaggctgctggtagtttccatagccgcccccagcataaccaccgtagtaggcgttagggtcctgaggaggaggtgcatatccgtatgcttcatatccttgaggaggatacccatagtatcctccaccaccaccatactgggcttgatcaggttgagtctgtttgttggaaggactgcgaccccatgaaagacgaatgctttgtcccccaagttgtgttccgttcaacacagaaagtgcttgctcagcacatgccctattggcgtattgaacaaatccgcaacgttttcctgcgggtattttcacatgaactagttcaccaaattgaccaaaaactgacttcaaatcatcttctgttacactttgatccacagctccaacaaaaattgttgtgttagttggatcactttctcctgaatttccttgagtgttctgatatgaagctggttgcattgtaagaggcttcttgttggcagcaggaccag

SEQ ID NO: 751 - DNA, 815 bp, Arabidopsis thaliana
  misc_feature (1)...(815): n = A,T,C or G
ctttttttttttttttttatgtaaacgtcaccactttttatttaagaagcaaattagaaagattaacactaccagaaaagcccatacaaagaaaccaagctgatacatattcaacacaatcattgattaataaaagtttaagtagctcttataacaccatctcatttggggcaggtaggttcgaatgcgaatggaccaacgttgtacacactgtacttgaaccatctcatgatggtcgaggaaaatcctggtttcaagaccggctttagaacggagcccttgcctccatcgtggagtgacgacactttgctgcacttggtgtctggagacttcacgaggaaagctcgacaacctttgatatcgtagttggtcaccgtcttaggggccaggagcatgaagtatccgttcttgtccgtctttgtctccgatattgagttcttcttgttcttgcacacaagtctcaccaccgcatctttaacgggtttagcgccttggacgttgttgacgcccgcgtacttgcaagctttgcagtagaccacacctctaactgccactagggtcttgttgtacttaggagggtaaactggtgggagaacaggaggtttgatcggtgggagagttggtaacttaatcggagctttggctggtgggagagttggtagcttgatcggagctttggctggtgggtaggctggtagtttgatgggagctttggccggtggaagagttggtagtttgattggnggtaggggaaggtgttggnnnaggctatggaagggatctgatgaaccaggttgattcactcctaaggtgaa

SEQ ID NO: 752 - DNA, 815 bp, Arabidopsis thaliana
  misc_feature (1)...(815): n = A,T,C or G
gagagttttaatcttcaatttttggctacatcgagatttggttctgaattttggcatctctattagtagtgaggccatttcctgatttggatcataaagagtggagaaaaatcttgcctttgtctccttaggattgtggcttgatcaggtaatgagactatgtgcttcaaaattgagacttgtttggtgaaagaagcggatgaaaaagtttctgtgtacagcgagaggaattagtggtttctgcttacgaatgatatgagaggttcttggtacaagagtgtttcctctgtttttggtctcagaccacggatcagagggttgttattcttcattgttggtgttgtggctctagttactattttagcaccattgacatctaattcgtatgattcttcgtcaagttcgacacttgtgccgaacatttatagtaactataggaggataaaggagcaagctgctgttgattatcttgatctgaggtctctttctttaggggctagtttaaaagagtttcctttttgtggtaaagaaagagaaagttatgtgccttgttataacataactggnnnnnnnnnnnntgggcttcaagagggtgaggagttagatcgacattgcgagtttgaaagagagaaggaaagatgtgtagttcgtcctccgagagattataaaataccacttaggtggccacttggtagagatatcatatggagtgggaanntgaagattaccaaagaccagtttctttcttcaggaactgtgacaacgaggttaatgttgcttgaagagaatcaaataacctttcactcggaggacgg

SEQ ID NO: 753 - DNA, 815 bp, Arabidopsis thaliana
aactccaaagcttgtttgatgaaaacagagtaaacggttctgttcaaaacatttttcaagctctgttactttgttttttcaacgatgaggaagttaagaggaatcaaaattagaagaccgattaaacaaatctcaagatggatcctccggagaattaagattcgtcgttcaagatacacccggttaagcccaaaccgcccggtttgcaagccgagagccatcacaaaactcataagttggggtcgaagtctcacatcccacagcgccaggtttattgggtctaaatgctccaattcagggtacataccaattggtcaagaacccattcgagaaaagcccgacccggttccgaaaggtcactcggcggtttatatcggtaaaaaagacggcgactttcagagagttttggtgcctatcgtttactttaaccatcctctgtttggtgagcttcttagagaggctgaagaagaatttgggttttctcaagaaggtggaatcactatcccttgtccttactcagatttcaaacgggtccaaacccgaattgaatccgggtcgggtttctgtaaatttccctggagccggcggtggcaataacgacggtggaagaagatgatgatgatgaaaaagttctttaactcttttttactattttctaccttttcacttttgttactatttttacccttttgttagatatgtacatattctgtatgtgaaaagtgaggtttgaatttaggcgataatgtaaataatatagagattttttattaaaaaaaaaaaaaaaaaaaaaaaaaaaaaaaaaaaaaaaaaaa

SEQ ID NO: 754 - DNA, 815 bp, Arabidopsis thaliana
gcaagttgaagaagcaaacgctgctgtaattagagagcgggaggctgcaaggaaagctattgaagaagcacctccagtcattaaggagactcccgtattggttgaggatactgaaaaaatcaattcattaacatcagaggtggaagctctaaaggcttcgcttcaggctgaacgacaagccgcagaaaatttgagaaaagctttctctgaggcagaagctagaaattccgagctggcgacagagcttgaaaatgctacaagaaaagcagatcagcttcatgaatcagtacaaagactagaagagaagctttcgaattcagagtcagagattcaagtactccgtcaacaggcacttgctatttcgccaaccagcagaactatggccacacgatcaaaaacaatgcttttaccgagaactccagagaatggaaattatcttaatggaggaacaaagactacaccggacatgactcttgctgtacgggaaccagagtctgaggagaaaccacagaaacatctgaatgaaaagcaacaggaaaaccaggatttactagtcaagtgtatttcacaaaatcttggatacaatggagacaagcctgttgctgcatgtgtcatatacaaatgtcttcttcactggagatcatttgaagtggaaagaactagcgtctttgaccgtatcattcaaacaatagctacagccattgaagtgccagataacaatgaggttttggcgtattggttatctaattcggccaccttattattgcttctgcaacgcacactcaaagcaactggagcagctagtttaacaccgc

SEQ ID NO: 755 - DNA, 815 bp, Arabidopsis thaliana
tgtgatgtatttgagaaagaaaagttcttcttacacgtaactattacagagatatcacatcagaggaagatgacaacaaaataatcttttattctatgtatacaaacagaattcactttgaagacatatatagagtcgacatggtttttgctcttttttaagtactaagtgattggtaaccatcttcccgtttctgtctccggtatatcacggcggctattaaaaccacaacagccacaactaccgtcactgcaaaaatggctaaaaagctcaagcttctcgcaggtgcctcaaaatgttgtttattaggcaaggagctatctggttccggcagctgctgagcaacgaggatgtaaaagagtcccataactccggtatgaccaacggcattactgtaattagattccaaagtcaatgtctctccatagctcactttcactggatcagctggataacaagacgacattccaacaatgtaaccagcttcgtttccaggttcatctccattgccatacttcggcattgaagcgcatatcccttcaccgttctctcggtatagagcaccaccgataccaccagcgtgctggtgagctaccccgtagacaatatacccatcaaatggcatcactaagctctttttcttaacgtcaacgcatccatcgccattggttttgcacggtttcacctcgtattccacatggcaaatatgttcttggctatctccttttgatctttcccaagaatctgtaacatcgaaaatataaaccttagcgggcaaaaccgagctgtcccaatcaacccatctcacggtatac

SEQ ID NO: 756 - DNA, 814 bp, Arabidopsis thaliana
agaattacaacattttggttacatgatattttgggtaaaagtagtttccatgtaaaagcctgcttcattcttttcaagtaataacagggttggaactgaatacacagaacacctctaaaggtatatcacattttaacttttgataattatcatcatcttccttaattggacttcatctcaacgtctgcgtcatctttagtaagagtatctggagaatctcgcggtaaaagaccgagaagaggcagagggagcaatgagctaagattgcagaggataataagtgttgataagttaccaaaactgtctcttgtaatgccgaatgcttgagtcagtcctgcacccataagcccacctagaacactgcctccgttagagattgacatgagtgtagcgaacagagttgcttccattccttctggacataatctcgctgctaacacaagaaccggcatgaatgaagcctgagcaaggactgttaggattagagagtctcctatagcaaaccattcgtcgctaatccccaactgtctgttaaaacctgacacgaggataacctgagtcatcccaagacccgtgccaaaaattgtcgtcacgagaaagatttttctcaatggaacagtcttcaggaatccattgtacagtcctactccaagcaatgaggcaattgaggtcacaagtttaactcgtcccagaaactccggggtaaaaccgagtttgttcgttgtgaagtaaaacattgcagaatctgagtgtggtgtggcttgccataagaatataaataaggtggggagaaaaacattcggttgcttaatgg

SEQ ID NO: 757 - DNA, 814 bp, Arabidopsis thaliana
ttttttttttttttttaaactcttattgaaaagcttgaaaagttacagaatacaagaaaccagagacaacaaatgagacagagttccgtttcttattgaaacaacaagacaatcgacccgaaaacgaactccctcaaagaacacaaagctcacacaaaccccccaagtcaacatctccttgtttaaacaggtagtgagtacttagcggaaacctccttccacgcagcacggctactaatcttatcccaccaagcgctaacatgcttcctatctttgatcaaatgagccttcccaataggaccaacaagatactcggtgaaaggaaggtgagccaaatcagctagactcacaaaatcaccagccaagtattcgttcttagaaagctgagcttcatagacatcaagcacttctgcaagcttctcttcactctccttaataactttctcatcagcagggaaacccataagtggtgcaaagacaatgttgagcgttaaagccaatagtggtggatggtaacttgtagcctcaacgtctaaccattgctctacttgtcctctctcttcaatagtcttccccaaaagatcaggtccttgtgatctatacttctctgctatatacctcatgatcgcacgcgactcgaagattttgtagtctccgtcgacgaggactgggattttaccgaaaggctgaatcgcgagatactcaggctgtctctgttctcctttcatgagatcgacattgacagtttcgaatgatactcccttctccaccaatgtcacaacagctctctttgaagaagcgaataaaggagcat

SEQ ID NO: 758 - DNA, 814 bp, Arabidopsis thaliana
ttttttaatgaaaggaatttggtggaacaagttaaaaattatttacaatgggataatatgcatccatctaaaatctcaatggatgttgaatactactaatattggtaacaacaacatactcagaacacaacatgtcaataaacctgtaaacactctctctaacttggcaatagtctcacaaagtaacgtacaacataacatgctcacggatagccatcgagcacgcctttgagtaggtttaacccttccgcagatatgctccgcctcacccgtgactgcattcggatctctatcctctgtggaggatccggagagaagcacacaacaatcactgtcaaattgtcacatgtattccgtttaagggcctccctcacaagctctctagagcatctctctggatcattatgaatcatcagttccttcctagctattgtcacagcgcactggctgctcatcacatcccacagaccatcacatcccattatcaagaactcgtcgtcttcactcaggtctgtctcttgcaactctggctctgggcttagcggacaagcagagcctttgggacctttcatgtgccagtctccaatggcacgtgcaactgatagttgcccgttgaggtaaccgtcatacacaactccacctaacttttctattcttactttctcggctgtgcagtttggtttgtgatctttggacaactcaattgccctacctcttctccccagtactgctcggcaatcaccagcatttgcaattatcaacctccgtccaaaaataaaagctgtaagcgcagtggtcccagaagagcggacgc

SEQ ID NO: 759 - DNA, 814 bp, Arabidopsis thaliana
  misc_feature (1)...(814): n = A,T,C or G
aatagaagaaaaacaaaccactgagctattatatatcagacaaggaacgtgttatgttctggctatttcaagacacaaactttcctccaacaattggtctcttgctaccagacagatccttttcaactcactctaacatgttcttgtgactaatcgattcctaatactccagtgcaaagggatggaagtgaaatcagcctaaatgtttcttaatcattgtccatattgcgtttgcgggtaataataactaagtagcttcttgaagagaggaacaatcgcaaccatagcaagttggagctgctcggagctgttaacacgaacacttacttgccctgctcctctattgttcagattagcacgagcaattaaattagaggaacgtccaatgggaacctgagactgtatgttccctccaatagcaagatcaccgtgccaatccattacagaaagtccaagagtagtcaaaaaccgaccaagcggataatctttatctctcaactgagctnnnaaagtaccaccataagcaaaatctccccgactagtcatagctccaccagacattacgattctgaaccatttactagcaataaacttatcttcgactttcaaccccgcagaaaccgaatcacccaagtgtgttacagaaagaccagctgcagccttgtttctcctgaaattgttaaatctcgtttcgcttcgaagagtataagccaattcctttccaacagtttgcatgtcgaaacctagggaagttgatttaccctctccatgtttaaccgagctggccatttctagctgtacctcggccgcgacc

SEQ ID NO: 760 - DNA, 814 bp, Arabidopsis thaliana
  misc_feature (1)...(814): n = A,T,C or G
tctctctcccattcgtctccaaagagattacagttttgagcatttctcatctctcgaagctcttctctgtgtgtgtggcgatggctgctaattcgataatggcttcctccaaacccctaatctccctgtcatccaaccaacaaccaaaccgagtccaaattcccaaattcgccaaacttccccaaattcccaaatccctcacttcctccaccgatctccgtagcaaagcactatcactctcctccgccaccgccaaatccttagctttaatcgccgctttcgctcctccgtcgatggcggaggcgatggagaaagcacagctcttcgatttcaatctcacgcttccgatcatcgttgttgagtttctcttcttgatgttcgctctcgacaaggtctattactctccgcttggtaacttcatggatcaaagagacgcttccatcaaagagaagctcgcgagtgttaaggacacttcgactgaagtaaaggagctcgatgagcaagccgccgccgtgatgagagcagctagggctgagatcgccgccgcgcttaacaagatgaagaaggagactcaggttgaagtcgaggagaagctagcggagggaaggaagaaggtggaggaagagctaaaagaagctttggcgagcttggagagtcagaaagaagaaaccattaaagctttggattctcagattgctgctcttagtgaagacattgtcaagaaggttcttccttctnnnattatatttttgttaactgtgtaattctctgtctctctatctcaaaacttatttacaagaaattactgtaaatc

SEQ ID NO: 761 - DNA, 814 bp, Arabidopsis thaliana
ttgtttacataaaagactgttttatttatatatatggacaaatgtatccaataggctctttagaagataagtcgtagggatgcaattagaaaacaaaactaaaataaacgaaccaatatatgatggaatgggacaggataaaattctaagactcagaagtcgaagtcgcacttgatcgggaaaacaatggaggtagttgtagttccgtttgaggtacttaaaggaagccttagatcatcgcaatcaaccttaggcttaatcctcctaaacttcaagtccccaagcttaaacctaaccctaagcctgaacttgatctctatattgtatacaccggatatcctctccgcgtttaaagtcctagactgtccggcgttaaaaataacaaggttttggccttggaacgttggtgtgagaacggttgtgtttttgtgtccttgatagaaaggagttaacgtgatggtactaaaccgctttccctcgtagtaggcatgagcttcgatcctatcgtagtagagtccgatcctcttgtttgggttacggacaggaacagtgagggctaggttataccttaaaatgttgtccggggaagtgtggtcaaagcgggtaagggacgcatcggtcacgtgaaacttgatggcacgaggtcggacgatgagccagaagatgagagcggctacgccgaggatgacaataagggatatgattactttgacgaataagctgaggaggcagcagccacagccacgaccgtgcccacgtcggtagtagcctttgggagctggtggtgggactgatggaccgtagaaggcgccat

SEQ ID NO: 762 - DNA, 814 bp, Arabidopsis thaliana
  misc_feature (1)...(814): n = A,T,C or G
aactaagatgtaactggtttatatgatacatgtacgagtacaaggtattactctcatcattgttgttgttgtctgaggttttattaagctgagcgnnnnnnacgggttcacggaatcagttggtggaagaaggagcatctggctgcttttccggtagtgcattttgaaacacaggcagttccttgtatgattcgtaacattttgcaagatttgggtatggttccatgttaatctggaatctgttgattgctccgtggatctgtggtgctagaaagagatcagccaggtaaatttcatcaccagtcgcaagtttcccagcgcaattcaccaacagtttctcgagagctgtaaatccttttgtgatagcattattaacccaagcagtcttctcctccacatttatcttttcctcgatatacctaataacagccagattttgatgaggctgtatgccagacaagacaatactcattgcctggtaattcacagctcgtttatggaggtcacgaggtaacaaaggtggctcagggtacttctcatccagatactgtcaatccaaacaccacaaaaccgaagatcgatgaaatgttctttttaatcaacaataccaaaaaaaagttaaatggatgtgttactactgaccattattatcgcaaaagaatcattaatcacaacatctccatccaccagagctggtacagttcccattggattgatcttcttgaaatctgaatcgaattgatcacccttgagcaaattcactggtatatactcataatcaagccctttcaaagcgagggcgatacggacacga

SEQ ID NO: 763 - DNA, 813 bp, Arabidopsis thaliana
tattttgtatatattggaatatgaacagtatcaaaatctttttaagactttgaagtacattgaacagagagattcaaagaataaaaaggtttctacttcttcttaagttcaagtagtcttgaccatctcttatcgacagaagctgtatttgtctgaccaacgtagtgcagtgttggttccgatttttcgcaggaatccgagcatatatctttagcataagttgtgaggcggatagtgtcttgcacaagggaatcaaggttagcttcatatccaggtctgacatatatcaccgaaggatcatcgccgccaatttctggcagtgttgaagctcgattttcccggcttgatggcaaaatccagacggtgaaacttgtatcgatcagtcgaggataaagagaagagcaaatgctgcactttcttgcgatagaagtcatgattcttccatctactgagaggcccatgctcgcgtgcctttggacagagaggtcgacagagacacgggaattgggagggccatcttcaacaaggtcttggagttgaagatcacgcagagagacatcgtactgagtcttccaatttccattccatttgccttcactaggagataaagtgatcagacgcttcactgtttttgagctccctcctccattaatggctgcggaagaagcttggtgtttcttggagagggaagaaaagggaaggtgatgagtattgccggaaactttaatcttcgagttcaaaagatttggagagatcaaacaacgtacatccatggatgatgattctttagaaaggactgtgaggaagaacctg

SEQ ID NO: 764 - DNA, 813 bp, Arabidopsis thaliana
cacgcgtccgcgcgattccaatcctaaagctcccgaattcaaaaatttgaaaaattcacaaacccaagttccgatttcatcatcttcttctccgcaagagaactcgaagatccccaaatccaaatcctggtctgtttatctcattctctccacgaccgaacccatcaaaacatatgtcggaatcaccaccgatttttctcgccgattaaagcagcacaatggagaaatcagaggtggtgcaaaagcttcaagtgcaggaagaccatggctttgtgcttgcattatcactggattcacttgtttaagtcaagcttcttcgtttgaatcaaaatggaagatcttttcaagaaagttaccgcggagaaagaaagacgaggagatgagtcagagtgatgctgtgcttcaacaccgaaggagggcattggataaagtcgaggaatcattagaatgtagtcatcttgaaactgactggaaaatctaaccaggtaaccaaacgactaacttaattaatcaccgatgtgctctgcagcctcacaagattacgtatctaagacttttatgctgggacttgacgacaatagcgaaaagaatatagcgagtatgtgggtttaacttgtcatatggcaatagtttgaaaactacattgcacaacctcatgggcattgatattttgtagctgttgtaacttttaagaatgatagacaaaagtcaaaacaaatgtgtttataattttcttattcattttgtgtcttcagtttaaaaagaaaaacaactatagacaatcatttttaagatatattgagaaaaaaaaaa

SEQ ID NO: 765 - DNA, 813 bp, Arabidopsis thaliana
  misc_feature (1)...(813): n = A,T,C or G
cttttttttttttttttttttttttttttttttttttttttaataaaagacacttcctaagcaaggaaatgacacatcaatatataagaagcttacacaaacagatagttatccgatcaccagagtcaacatctctaaagacaacaaataagtaatcaaacaaatacaaatatatctcttccataactcgaaactcattaatgaagaaaacagcagatcataagattaaacagagagattagagatggtttttaatatcatcctcatcttcatcaaccatatacttctgaaacaaagcagagcagaacacatcactcacttctttctcaaatcccatgttgttagcatgtctgatctgcgaggcaatgccactgtaatggttcaagatcacacgagacttctcacgtccaacggagattttagagcaggttttatccgagcttttcacaagcaaaacatcgcacatctggtctctgtgatcgtcgtggacaatgaacttatactttccttctttgtctgatacagctttgtctgtgtaaacctcttccattgtcttcctgtctttgcatgatagcttcaccgttgcaccggggatgaagtaggaggattcaggagtcnnnaagccgaatttgcaaatgtnnnagtaggtgctaccttgaacnnncattgtattctttccaatatttcccctccttgccgccatggctatcgccggtaagatacagagaaccaacaacatcnncagtttcgccattttttcgaatctagagagagagagaagtagagcgattatggatttgaagtgagaaggaa

SEQ ID NO: 766 - DNA, 813 bp, Arabidopsis thaliana
ttttttttttttttttagttggagagtggattttgaattgaatagtggaagttataccacaatggtatttttggatacaaagggtagcgatttcattcaagaccgattgtgatcagaggagattaattaatacaatacaaaatgaccaaaacgaaccaaaaagcacagcaaataactaagacaacccagtacaggacgataaagacctctaatggcggctcttgatctctctctctctttctctctatataattccttgtctacttacctctagttaagtgcagtcttcttcttccgcattctacaacctcaagctttgcaggtttgtagtagactttgttagggctctacaaaagtactctcttatctctggtattgttctctgcaccagctcgttctgccaaggcattgaactcagtttatcgaaatgctccaggatgaacatgatacaagcttgcctcagcgacatcgcatggaatgcttctgatagctcgtacatgtctcctatactttccaacgtaatatcctgagcaattgtgtattcacagagtcgtttcaggccctccaagagatactgatccgctgctcttagaagatcttttgatatctcatttgttatgtcgacagatccagtgtatataaacctcatcattaactcaaacacctcccatttgatatttggaatctcaatatctctagcgtctttttctctgtaaccaccatcaaacattgcacgaaatgcatctgaggatgccagcagacaaattctgtgtgcatagaatgtccttccttcgactagaaaggttacatcag

SEQ ID NO: 767 - DNA, 813 bp, Arabidopsis thaliana
ccacgcgtccggcataattggagaaggcttgagatcgagcatgaccgggacgatgttatgagcacgattaggtcgacaatgcctggtacagtggtgtatggtgattacgtaattgaaaggaacaatgccaacggttcagattcagacgagggtggtgatgatgatgggatcgatgctgcatttggcaggaatcttgtgaatgttttccttctgttacatgcctttggggcatcaggtaatcagatcagacgctctgattcagattcgaatgactcgacaacaatcaaccgaggaacaagtgagctgaatttctctgaagaagaagaggaagaggaggaggaggagaggcatagtaacagtaactctttggcaagtcgaatgaggcgacaaggacgcgttctgctgggacgttcaggtaggagacgtagagatagagaagctaaccagaacacaggtcctcctcctagatgagagagaatcacacgaattcaaaagaaaaccctgtctgattttgggtttcaggtaagctttatggtatggttagatacaaatgtagtttcgacaagtttaaaacaaaacaaaaaaaggcttttggcctttctgctatcaccattggagaatttgggaatttgactcgaaattctttcatatgctagagaagcaggcttgcaatctcatgttttatttactgtattctgatgtaactttctgggtggaaaattcacaaatatctatccttgtgaataagcatgatcagtgatgatgaccaatgaagtcttttagcgaattatgaaattgtgtttccttgtgaaa

SEQ ID NO: 768 - DNA, 813 bp, Arabidopsis thaliana
  misc_feature (1)...(813): n = A,T,C or G
ctttttttttttttttatcacaagaagattttgaatcgaatgttttagtttattaggttttttttttttcatttgagaaatcaaacttagaaacattgcaagactcactaagtctagttgtttatagcattcaacttatatgcaagaacagatttctagcaggggagttgatccttgtagatgttcaaacccgangtggatgcagtaattgggcatagnntgagagaaaacgaatactgtgcaggcggaatcagaaacttatcgtgaacacatggagtccagctatcatctcccccaagacccatgtgtttgtggtccagatgcacctcgatgttttnnnnnttgataagatcctcttcatgcgttgcacggtgaagctcaccggttgtataataactagcattcatttgcattagagaagagctaccatatgttgaagcatatattcctacaccatctttgtttcggaatgttacccacctaacatctgttctacctccattttctcctggaacaatataagggacatgcatgtctccaacattgtgttcatatatcgccacatgggctgctgcttttcggtctgggtaacactcaaatggacctttgccataccattctacacggtccagtgttttttcaatgtggaattctatacctacacgtggtagcggtggaagatcagagtttggttctacaaaccaattggtgatgatatctccggaaccatagatcagatatgtcacattgactttgaataaggcatctgactttgaagagccagaagctgaagaaccaaggtaaatgaactct

SEQ ID NO: 769 - DNA, 812 bp, Arabidopsis thaliana
gatattaagacttgagtttttttagaaacgaaaatttgataatacataaaacttttccaaagcaaaccgttcacaaacgcttattttgcgggtaacaagatgaacaaaagaatattcagactaattggttggttacaagatgccttgaagaaggggtttcccttgaaacttgtcgaccttggagctcagaaatgtgaagcttttgtggagacgagctcttttcatatcaagatcccctaacttcgcagccatctccgtcattttagctctccactcctttatcttcttctccttctctcccagttctttcacctgtttctcagtttcttgtttcgcaagtaacacatctctctcccacacctctttctccactacgctcatcttgtgttcatcgtagtgttttaccgcctctacgatctcctccaggacaggcttgagccaacctgctttgattttcacggactcaatgtctttaacaatcgctaccatttccaccacgcggctctccttgagatacttcaggggagttgtttggagttcgaataccaccgaggcaagcatgtcgaggtagtaggatcgtgtagcaagcgattgtagtttggaaccagacgcaatgtcaccgtgcttctggagtatgtgttgtagagtggtcgagacgctagctctgaccttgtactgtcccacagaaacgtaagactcagatagaatagactgcatcacgtcccttatttcattattggtaattattcctttcatacgagagatctcagcgagactgaagctctgtgattcatctggcagctccggtggct

SEQ ID NO: 770 - DNA, 812 bp, Arabidopsis thaliana
ttttttttttttttttttttttttttttactccattaatctttcacttttacacacaatcacccaatatgtaaacaagacacaaacgaccaaacaaataacaaaaactaaaaagagttgttgaatcacacaaaaacaaaagaagaagaaagaaacagagatgaattgttacaaagatacaaattcaataaaggcttagaaacatccacacgttgcctttggtactacaccagtggctctatacttagcacccatttcttcagctttgagaagctcttctccttttttagcttcaaccattgctctcttctcttctgctaacttgtggattgcagctactttgttcttcattttctcaccgtactgcgcttttttcttctctaatttttcctcgatcttcctaagttgagcttctacggctgctttcttgctattttcccaagcatgcacatcagagatcttcttttgtgccctgttctcagcctttgacttctcactctcttcccatgctttgatgaatgacgttttcttctctttttccaagtcggcaagtatcacatctctatcggccgaaccagatgaagctttcttaggtgtatgctcctcgatgggtttttctacaacggcaagagctttggactcgacgggaggtggattatgaattttctcatccgcgacttccaccggagcaggagtcggttccttcgccggagctaaaacagccggagattctacgtcaaccttactcgtcttttgctcctccgccattgtctctcagccgaagaagaagaacagattttatcggacgcgtgg

SEQ ID NO: 771 - DNA, 812 bp, Arabidopsis thaliana
ttgaatccgtgtttcattcatcgaatctttttccgataactatggctgaggaaatcaagaatgttcctgaacaggaggtgccaaaggtagcaacagaggaatcatcggcagaggttacagatcgtggattgttcgatttcttgggaaagaagaaagacgaaacaaaaccagaggagactccgatcgcttcagagtttgagcagaaggttcatatttcagagccggagccagaggttaaacacgaaagtcttcttgaaaagcttcaccgaagcgacagttcttctagctcctcaagtgaggaagaaggttcagatggtgagaagaggaagaagaagaaggagaagaagaagccaactactgaagttgaggtaaaggaggaagagaagaaagggtttatggagaagttgaaagagaagcttcctggacacaagaaacctgaagacggttcagccgtcgctgcggcaccggtggttgttcctcctcctgtggaagaagcgcatccagtggagaagaaagggattcttgagaagattaaggagaagcttccaggataccaccctaagaccaccgtagaggaggagaagaaagataaagaataagaagattatcattaaagatattaagaataatgatggttgatttgctttgttttttttttttttattgtgatgattgatcatcttttgcttttgtgatgtgtaagtttgttggcttttttgttgattacaatttcttattttctcttgtatatggtttttaaaaacaaaagatctcaaggtattttaatggtatgaatattttcatttgattaa

SEQ ID NO: 772 - DNA, 811 bp, Arabidopsis thaliana
  misc_feature (1)...(811): n = A,T,C or G
tttttttaaaaaaaattaaccatattttacatgaacaaattattcatacatttgggcttaagagaaaaatggttagcatttagcagcatctgacngatgtcgtcatggatttggtctatatctagtatttatcatgtcctctaagacaaacggaatacacaagtatgcatacatcaagacatatattgcatacataaattaacacataagtttgagcatatctcttactaacttggatcacagtggaggtctctccaacgagacatacccgaatttgcctttgcgaaaatccgttagtattctaaatgcagcttgatgactatctccaccaaacaaattaagaccaagcgtcttcacaaattttttcccgcagttgccttctagctggatcttgtatcggttgtaaagagcctttgcgcctacttctggaatccgtgctaacatnnncacaaggattccagcaacatcagtgaagtcataagctttctctccaatgtcatcacaaattgccagctttatagcagctgcttgatcatcgatacgcataggaagcattccaggtgaatctaagagatcaagatctttcccaagcttgacccatttcatttctctagttacacctggtcttggagctgctgcgcaaatttttcgtttcaatagacgattgatcagagatgatttcccaacattagggtatccaattattccagctctaactgatctagggagaagtcctttttctcgccgtttcccatttacgtcacctgctaaacttttggctaaccgacctagcttcatagctcccatccca

SEQ ID NO: 773 - DNA, 811 bp, Arabidopsis thaliana
  misc_feature (1)...(811): n = A,T,C or G
tagtggtcaaatcataataagttccaatgtcagaattctatgaacactatgtttgttgttgtatgagaaaattatgtttccagtataaataaaagaacttcttaaacggtaacggctacgggttaacactaaggtgctccttctcctgcaggtccggtccgagcattcaacaatggttgcagagccttcacgacaatactcatgtttggtctgaaatcagcttcgtattgtacacacaatgcagcaacagcagctaacttagcaacagcttttggagggtaatctcctcccagtcttgaatcaacacactgcttaaccttgtcttcgcttagctttggtgtagcccatgtgactagactttgctggcctcgaggcaatgtatgatcaacaggctttcgacctgtaagaagctcgagcagtacaactccgaaactgtatacgtcactcttggcactcaattgcccagtcattgcatattcaggggcatggtaaccaaaggttccaagaacacgagttgaatgaaggcgtgctgccatatcaggagcttgatttgagagatcaaagtcagctatcnnnnnnacatcgttatcaaagattagaacattgctggattttatgtcacggtggatgacatgtggatttgccttttcatgtaaatactcaagccctcttgctgctccaacagcaatcttcactcgttgatgccacgacaagagtggaccaggctttgctcccttcacaccttttctcccgtgaagaatatcatgaagagatccattttgggcaaactcaaagacaagcggacgcgtgg

SEQ ID NO: 774 - DNA, 811 bp, Arabidopsis thaliana
  misc_feature (1)...(811): n = A,T,C or G
ctaaagaagagtttttttctttaatctctcaaagtttatgaagatccaatagagaacaaacaaaaaataaaacaagttgaagctgaacaggactctagccacatccattcttataacagacttagatacgaatgatcagtaaataactcctatcatccaaccaaactgtatcttttggttggagtaattagagatcttacttgatttaatttagaagaatgataatttagagaggcacagggtaacggttgatgcaatccacccaaggattgttcctggttggcttcttcaccttcctcattgccttccacaccacactgttacacttannnccagaaccgaaagcgatctgccaaaccctatcgcctctacgaacactttccttggcctccatgtaagcnnactcataccagattccactgctagaagtgtttccaaacctgtgaagtgtcatcctagaagcctccatattctcttcactcaagcctagattcttttgnnnctcttcaagcactactttgcttgccgcgtggaagcaaaaatgctcgaaggcgagcttgtagtccgggatgtatggcttggacagatcggaagaggaagacttgattccattggtttttgcggtggcggaagtagagaaggaagtggttgtggacgttttggcagcaggtgagaatgttcggcggagcaaagcagcaaagaagagaagctgctcggagaaaggtaggacaagaggacctaaggtagtgatgtttgtcttgagagcttcacctccaacttccattaagtctctacttatccggacgcgtgg

SEQ ID NO: 775 - DNA, 811 bp, Arabidopsis thaliana
taatgttctctattgaaatcttaagcatattcgaatatattttacatgcaagaatgtaaaaaaaaaagaaaacaacaatgtgaacacatgaaattggaagaaagtgtaaatacttgaaacttttcaatctaaaggttttcacagtttgatgtgatctcaaataacaaaaaaaggtaatacgaactcataaactgttgttcaaaaagggaacaagagaaacattgtcaatctaattcagtttagatgaagaggctgcaaaacccgaactcaatcttgtgtgccgtttcaccatcctcatctggagcagaagttccctcagaatatgtgcaccaagtcatacgcaaatgtccagaacagcacaaacgacataaggccaccaagaaaaccgtcaaaaagaacccgattccacgaatcaaagtacaagtcagctgagaatcctgccttagccatgagcccaacagatgtgatcaacatcaccacaaagtaaaatacaaaaccaatcaagccattgaatccaattattcctgctaagacaccagctatgatagacagaaacgtccggctgttttgaatgactttcaaattgttctgcaaattctctgcactgaaagttggtatgtcactcatgatatcctttgatctcttctcagatgaacccatttaagataacaacaataattagaaacgagagtagtaagaggaagatcgaagtagcttgctttggtacttgggatgaattgaatggagaggatgagccaatttgagagagaacaatcagacgaatatctttaagttctttacggacgcgtgg

SEQ ID NO: 776 - DNA, 811 bp, Arabidopsis thaliana
tcaatacaaagagactaagaacatacagtttatacggacagaaaataagacagtagtttgggtttcgaaaaacaacgaactatttgttctggacaagcttttattgaacaagaacttgcaactatatgttctggataagcttttattgaacaagaaggtagcaacaactactaaaagaggggtaggcttttagggaaacgaacctgcatccattgcttctcatacgtaaccaaatggctccaacctatttcctccagcaaatccagtttaagttcgtagagtttcttattcgcagtctcgttctcgttttggatcaagtcatcaagtaccttcaatgcggtcccgagtcgtgatagccgtttctctcttagaacagtgagagtaccgtatttagatgatttcacgtctacccattttgtcagttctttgaaattctcttcgaatttatccttctggctactttcttcttctccttcaccttccttctcacccttcagattctcgattctcgccatggctaaccctttctggtatagtgcatccgccagttgatcacgtgtcacctccatttttttcttcaatttctctgcttcatcatcttctggttcagttttgtctagcaagaatcttgctagctcatctacgtcaacactgcgtactacttcgtttgcagcttctataatctcttcgtgatggctgattttgtccccagcatcagaccgagacagtaaaccttccaggatcttagctagtaatggagtatagtctgggtattcagacttgagacaggtacacaactttctccactctg

SEQ ID NO: 777 - DNA, 811 bp, Arabidopsis thaliana
ttcagatcgccgaatttgcagtaaggagacgaaaatatggtgcacgtttgctactaccgcaactatggaaagaccttcaagggaccacgtcgtccttacgagaaggagcgtcttgattctgaattgaagctggttggtgagtatggtctgcgtaacaagcgtgagctctggagagtgcagtactctcttagccgtatccgtaatgctgctagagatcttttgactcttgatgagaagagtccaagaaggatctttgaaggtgaggctttgctccgtaggatgaaccgttacgggcttcttgatgagagccagaacaagctcgattacgtcttggctttgactgttgagaactttcttgagcgtcgtcttcagactattgtgttcaagtctggtatggctaagtctatccatcactctcgtgtcctcatcaggcagaggcatatcagggttggaaagcaattggtgaacattccatcattcatggtgagacttgattcacagaagcacattgactttgccctcaccagtcccttcggtggtggccgtccaggaagagtgaagagaaggaacgagaagtctgcctccaagaaagcctcaggtggcggtgatgcagacggtgatgacgaagagtaaatctgaagtcgcaccgttttagctatgaatcaatctgctttttgatattttgtagtaagcaactttgttgttcgttttcagaggattgttttatggtttctttcttttactctcgagattgctaaacctttgggttatcatctatttctcacaattatctttaaaaaaaaaaaaaaaa

SEQ ID NO: 778 - DNA, 810 bp, Arabidopsis thaliana
  misc_feature (1)...(810): n = A,T,C or G
tgatttggataaagttgaagatgaggaggacaaaatgacgctcaaaatgatgatccagcaacatcaaagacacaccaacagccaacttgctcaagaagttcttgcagactttgagaatttgctgcccaagtttatcaaggttttcccaagagattacaaacgtgttttatcagccatgaaacacgaagaggtctccaagcaagcaatcgagcgggcttctgagaaagctgacgagactgaagagaaagaactcgaggagaaagatgcatttgcagaactgaagaacatggcagctgcttcgtcaaaagaggagatgtcaggaaacggagtggcagctgaagctagaccttctaaggtagataatgctgttaaaaacggtggtttcattgcttatgagcgtgagggagttaagtacagggatcccaatgttcgtcttaatgactggaacgaagtcatggaggaatcaaaacctggaccactccttacaactcagtcagctcgttgcatggattgtggaactccattctgccaccaggagaactctgggtgtcctctcggtaataagatccctgaattcaatgaacttgtctaccagaacagatggcaagaagccttgaatcgtctacttgagacaaacaactttccagaatttactgggcgagtatgccctgcaccatgtgaaggttcttgtgtnnttggaataattgagaaccctgtttctatcaaaagcattgaatgtgctattannnnnaaagcctttgaggaagggtggatggtaccaaggcctcctctcaagagaacagggaaaaa

SEQ ID NO: 779 - DNA, 810 bp, Arabidopsis thaliana
  misc_feature (1)...(810): n = A,T,C or G
ttttttttttttttttttttttaaccaaaaatttcggctttattaacttaggttacattgttgccttatgtaaactcaaacacttagataanaaannnnnnatctattacaaaagaactcttcacggtcccaaaaactatataaggcttattccttttcgacattgtcaaaactttcaatgtcagatgtccaaacacaaagccaggaacaaaaaaccttctcaaacaacttgtagtacaccgaatccgggcaacgatgatcacacttataacaaatcggtcgagtatgactattgttcccaagaattttcatcgatgcagagccnaaatagaacgtgtaacctgacttaatataaacggaagatccgaatatacactcaaggtggatagtgatacaacatttgttgcatgagtagaaccattctcttggattcaattctttctcgcatacttcacaccaatatgctttctctgcatcttctccatagcaaagcgacagaagatgtgcatcatatttgtagtataactcatatggaatggtcgcacatcgataacacatagcaaatgagcaaatagtacattgcagataatactcatcacgaacactatctttgcaaccatcacaagaaatgtttccttttctagaatatgatgtggagatgaataaaggatgttcatgacttttgtgggtgaaacaatcaggaactaaaatgcatcgaaaatctatctgaattgttatctcatcatcgcaatcagtttttgaacatttgtacctgaaaccagtggactcacgggcgcaagttgaacaact

SEQ ID NO: 780 - DNA, 809 bp, Arabidopsis thaliana
  misc_feature (1)...(809): n = A,T,C or G
tacctcctcagccgagggcccaaccacgtccaccctcaccttcgctgacagctcagaggttgatacgggaacagcaggatgatgagtatgttgcgtccctgcaagctgaccgagataaagaaatgaagtccattagagatgctgaggcacgtcagctagaggaagaaactgcgagaaaggcttttctggaggaagaaaagaaaaaagaggaagaagctcaaagaaaactcgaggaggaacaggagctagaaagacaactagatgcaaaagaagcgtctttacctaaggagcctcaagctgatgaagagaatgccattacccttctaatccggatgccggatggaacacgtcggggccgccggttccttaaatctgacaaactccaaacccttttcaactttatagacattgccagagtggtgaaacccaacacttacagactggtgaggccatatccgaggcatgcgtttggagatggggaaagtgagtcgaccttaaacgatcttggattgaccagcaaacaagaagcattgttccttgagcttatctagttttaagctcttaaatatataagaagaattacatttgtcttctgcttagaaaactctttaattttcaagttattttntttatctttctttatacaaaagaaaaagtatttgttgagggtggaggattatatggtttataaaaccgtcgtcgtttagtcgtttcagttgtacatacaatactgcctaatgtctgtctctctatctgtctagtagttataatgtttatcacatcttcaaatttgctcaaaaaaaaaaaaa

SEQ ID NO: 781 - DNA, 809 bp, Arabidopsis thaliana
aaaatctaaaatttctagaagcaacaactgatgaaattcgagaagaacaatattcttacatataaaagatttaaagattatcccccttcacttaaaaaaaatactaaacacatgacctggtcaagaacaacacaagactcaggcaaacattggttgtgtgctttattcgaaactataataatatctgaagaaagtgacaagaagaccagaaaagagagaggtgaggtgaaaaacggttttggtgcatggtcctctctagcgagcgtccttggacaaaagaccttgcgcttcaactttccttgcgttgcgaagctcatcaactccatctcctctctcaaacacagctgctgcacccatccccgtcccaatgcacattgacactactccaaaacggcagtctttaccacggcgtttcatctcgtgcaacaatgtagcaacacaacgcgctcctgtagcgcccaaaggatggcctatggccattgcacctccgttgacattgattttctctgggtcaagtcccaatttgttacggcaataaacaaactgagatgcaaatgcctcattgatctcaaacaagtcgatgtcatcaagttctaaaccagccgccttaactgcagcaggaatggcaactgctggaccgatacccatgattgcagggtcaacaccaactgcagcaaatgtcctgaatacaccaagaacgggaagtcctttttgcattgcaacacttctcttcattaggagaaccgctcctgcaccatcacttacttggctggaatttccagcagtagtggtgccatccttcgcggccg

SEQ ID NO: 782 - DNA, 809 bp, Arabidopsis thaliana
  misc_feature (1)...(809): n = A,T,C or G
ccacgcgtccggacagatcatcggcaactaatctcgtcatcgcatgcatcataaaccaaattaactaaatcatccatttaatccatttgttcttatcagatcatccttttccttcctacacaagaaatggcgaattacatgtcggaagcagcacagctcagaagaggtctaaagcctaaagggaagacttatgggttgaccaatcagaagagacgagagatcagagagatctttgatcttttcgacatagacggttcaggtagcatcgatgctagcgagctcaacgttgctatgaggtctcttggatttgagatgaataatcagcaaataaacgaattgatggcagaagtagataaaaaccaaagtggagccatagatttcgacgaatttgtgcatatgatgacaaccaaattcggagaacgagactccatagacgaattgtctaaggcgtttaagatcattgaccacgacaataatgggaagatttcacctcgtgatataaagatgattgctaaagaattgggagaaaatttcacagataatgatatagaagaaatgatcgaagaagcagaccgtgacaaagatggagaagttaacttggaggagttcatgaagatgatgaagagaacctcttanggctaagtataanncaattagtaatggttgtgaataatatttgttaatnccctnnnnttttaataataaagaagtttgatttgtggcttggtcgaataaaaatgtattgttgtnnaaaaataataatgtaattcacatccattattttgaatatgtaaatgtccttgaacgaa

SEQ ID NO: 783 - DNA, 809 bp, Arabidopsis thaliana
ctaaacccattaaagtaatttagctcctcatagattctcgagaagaacacttccatggcgactaaagtatatatcgtgtactactctatgtatggtcatgttgagaaattggctgaagaaataaggaaaggagctgcttctgttgaaggtgttgaagctaaactatggcaggtaccagagacgcttcacgaagaggcactctctaagatgagcgcaccaccaaagagtgaatccccaatcataaccccgaatgagctagctgaagctgatgggtttgtctttggtttcccaacaagatttggtatgatggctgctcagttcaaagcctttttggatgcaaccggtggactctggagggctcaggcactcgccggtaaaccagctggtatcttctacagcactggctctcaaggtggtggccaagaaaccacagcattgacggcaataactcagctggttcaccacgggatgttatttgtcccaatcggttacacatttggcgcgggaatgttcgaaatggagaatgtgaaaggtggaagcccatatggagctggaacatttgcaggagacggttcaaggcagccaacagagctggagctacagcaagcatttcaccaaggccagtacattgccagcatcaccaagaagctcaagggatctactgcttagagcttaaaaagattatggtatcaataagaaaaaaagaaaaaaacagtttggttctgcttttttttatattctttctctttgaatttgggggcttttgtgatttttcgggtttaattatcttaaaatacatgatattattt

SEQ ID NO: 784 - DNA, 809 bp, Arabidopsis thaliana
  misc_feature (1)...(809): n = A,T,C or G
agaagcatgagcactaaatgactaatgttacaacttacaacttacttacatgtccacaatataggaaagataatgactaatgagtacacaagtaactcggagaagaactacaagtttacagattcttgaccaagtaaatattgagaaactcatcattttcaattccatcaatagatcttcaacagatcactgaattctgcatccgctagacgtaggtgcacgctgtacattcccgtaagctgttagctcaatcagatccatatctcggccagcgactcgacagtaagaactcctttggataagctcggatcgagaaatatcgnnnttattannnnttgatcggtttacctttgcctgcaaaacctgacagttttccagagtgctcttgccgcccttggagtaaggaacaatgtgatcataatcatgacacaagcatccaggacaaccaacaagcttcctaaacacaatgttccctaaatgatctctcctccaacgctcaggatctcttcctttaatcttctctgctttttcccaacattgctgcttcacactataaggaaagctcctaggttctggattcgggtcaccgtaacccgacccgggaaaaagacccatctcctcccggtcgagtaaagtggccgaagttttcacctttccaccacgggcttcaccggtattccggttgggagacccggaagatagttcgggtcgggtctttgatggagaagaagaagataaggctctgtttctgcgtctggtcgggtcgggtttcatcgcagagtgttgtggattatccgaatcgatggaga

SEQ ID NO: 785 - DNA, 808 bp, Arabidopsis thaliana
  misc_feature (1)...(808): n = A,T,C or G
ataatatccaattgtgttaggaatcgaaaataaaaccccccaaaatatcattacatctttggattttaatcagcacaaaacgagagaaaaaaaagaaagaaagaaaaaagggtaaaaaaatattnanggaagaagagaaatatgacgaagatacacacaattcggattaatatttagctgaactcaatcatttttttctgctgattcaagttcttataaaacttctttataaaatcatcagctgctttgtcaacgtgtccattagccacatcaccattttccggcgttaacggaaacggtgagtccgttactcttaacggtctaaccaatggagtctgtccaaaaccggggaaataaggagacaaagccaccgttaaatctgccggcgtgacgtttcctttgtctccaacgccgttaagaagctcaagaacggctctagcggcggctacgtcgtcgtcaagcgtctgaggcgtttgaccacacgtgaagagattattgtgactctttttcctcatgaaagccatattagagaaagggaatgaatagtttggagtgttgctgcagctaaactcgtactcttgtcgcgatgacgcggtggctgaagtagcgtttagagcggctgaggcggtggaaccggcgtggacacgacgacgttggtggaacatgaggttcttgccacgtttgagagtggcgttgaagtcagcgatgagtttgttttttgagacgcctttgcggatcatgtacaagagaaaacgtacgatgttccatagcttcttgcttattggtacgttttgatccatatcaagat

SEQ ID NO: 786 - DNA, 808 bp, Arabidopsis thaliana
  misc_feature (1)...(808): n = A,T,C or G
gaggtacaggtcttttattaaaccaaaccattccggttcaaactccggacagctacggacaaaaaccgcatcgctttcgtcaatcgagtaaccaaaccgaactgagtcagagactccggttacatcttcctctgtcttctcaacgtatctagtaacttcatgataacgaaacacgatgtttgacttgaacgggacccacggtggcaccaccgtgaaatcttccggcgttgatctaatttcttcaatcaaagacgaagacggtcccatgaaacagagagtagctgcgttaaagagactaaagaaagccttagagattccaagctcggccgcaatagaaggaagccagtgagaagcatagtcgtatatgatccaatccggagaagaccgtcggagaaactctttcaacggtggctgaagaagatcaaaagcggctttaagagactgttgcttgttgtaaggaacgtccatggatgattctgaagaaggaggcaagcctgagatgggagggagagggaaagagacgaaggtgatggaggaggcgaggtttgattgtaatttaggaagtctttcgatgtttcttggtgttgatatgaaagagatcttgtgacccttttgagctagtaacttggagagacgaagaaaaggaaggagatgacccatagctagccatggaaacatggctacgtgcataacttcttctctcttnnnaccatttttgttattctctgcacatcttcaataaagcatggacatatcacatatattatggaatcctagttacgacctgcccgggcggccgctcgaggta

SEQ ID NO: 787 - DNA, 808 bp, Arabidopsis thaliana
ccacgcgtccggatagataagaaatcacctaatgcagggcaaaagaaacggagacaaagatggagattgggaaataaagaactctcccaactttggagatgggcagatcaaaatccgaatgctttgactgattctcaacgcgtgcgaacccctgatattgcagactactggaaaccattagcagaagatatggatccatcagctggcatagaagatgagtaccatcataaaaacaacagagtttactgctggaaaggtcttcggtttacagctcggcaagaccttgaaggattttctaggtttactgaaatgggaatcgaaggagttgtcccagttgaactattgccgcctgaggtccggtccaaataccaagctaaaccaaacgaaaaagccaaacgagcgaagaaagaagaaaccaaaggtggatctcatgaaacagagggaaaccagattggtgtttctaatagtgaagctgaagctgaaggaggaaggggtgatgcagagacgatggagagtgatgctattgcagacactcctacgcctgaggaacagcaaagactcggtggttctgatacagaaaacggtcaagaggccggtcaaatcgaagacggagagacagaagaagctggtctgatggacactgatcttgatcatcctcctatgcccgtctcatgaatacgctttcagtttgtcgaccctttcttcaatggggaatcctttggatatgaagttcaaaagtattgatgtttaacaaattatgttaaaaggtattttctaaatatgtttgtatgagtgcaaaaaaaaaaaa

SEQ ID NO: 788 - DNA, 808 bp, Arabidopsis thaliana
  misc_feature (1)...(808): n = A,T,C or G
gtttcaacaaaaaaattaaacttagacaaatcgaaattttataaatttacatacaacaataatgccatttttattaaatcaagtaaaaagaatcagtattattattacttatggtttttcttgagtaacacaccaaacttcttcaacattttgctagtctcaatagaatctgttctttcctcatcattgttcagtatagaagctgccgtctcagcagctttcctccattgctcacattgaatcttcactcnttnaagctcagcttccataatcacttctcttagtacgaaaacaacatttgccttatcaagttggtgaactcgccggaaaaaaatccaaaacaacttatagagatacacataaaattgatttcttattgtgctggaggaggaggagtaaaaggaggaggaggaggaggagtctcaactaaaacatctagcttcatgccttgaacgcaaccacctcttccatcaagtagataataacgtctagtctcatagagaggaacaatatctctcccagctccacgtgtataattacgtattgggcggttggagatacatttttcataatcagccttgtttacctcaagaatgttgtgttggtctctatagaacacaaaataaagccagtctccgacgtagaaatgtttgccttgagcccatagggtatagttaatgttggggttccagaactttttgtcgccgactaaatatttcttggctgttacttctggtatcggcgccgccactagaaaagccagtacaaccgccgagattagcaccatagatctcccccggacgcgtgg

SEQ ID NO: 789 - DNA, 808 bp, Arabidopsis thaliana
acccgtcattgcgtcaatgtcagatgtggcagcaagtggaggctactacatggcaatggctgcaaacgccattgttgctgaaaatttgacattaactggctcaattggagttgtcactgcaagatttaccttggccaaactatatgaaaagattggcttcaacaaggaaactatatctagaggaaaatatgctgagcttctgggggctgaggaaagacctttaaagccagaggaagcagaactgtttgagaagtctgcacagcatgcataccagcttttccgagataaagcagccttatcaagatcgatgcctgtcgacaagatggaagaagttgcacagggcagagtgtggaccggtaaggatgctcattctcgtggtctaatagatgctgtcggtgggctgtcccgagctatagccattgctaagcagaaagctaatattcctcttaataagaaggtaactcttgttgagctttcaagaccttctacatcactaccagatatcttaagcggtataggaagctcggtgattggagttgacagaacattaaaaggactgctcgacgaattaacaatcaccgagggagttcaagctcgtatggacggaatcatgtttcagcaacttggccgagattctttagcaactcccatcattgatatgcttaaagattacctcagctctctcagatgattccgacactagtactgaatctcatttgaatgaaactaaagaaaccgatgaaacatctttaaagtcaaacattcataaataaaacgaaaatgatatcaaacaagtttcaagcggccg

SEQ ID NO: 790 - DNA, 807 bp, Arabidopsis thaliana
acaattcaattacacagcacaaaatctggattacaaaagagttttcacacgcatatgatctcgtctttattttcaaacagaagcaacgaaaatgtttccccgggaaaaacaagttgaatgaagcagagactgttgtagaatggttcagcggtagagactctccgacctcagattctcagcaatctctgtctcccatcgatctccattctcaagaagcttctctttgtcatagagaagttcctcgtgtgtctcggttgcgaattcaaagttaggtccttcaacgattgcatcaacggggcaagcttcttggcagaaaccacagtagatgcattttgtcatgtcgatatcgtacctagtggttctgcggcttccatcttccctctcttctgcctctattgtgattgcttgagctggacatacagcttcacagagtttgcaggcaatgcagcgttcttccccggtaggatatcttcgaagagcatgttcaccacggaagcgagggctcagaggacccttctcaaatggataattgatagtaacttttggatcaaagaagtacttgagggtcagcgacaaaccgcggaccatttctgtgaggaacagggtgtttatgctccgttcaaagacagtattccagtccttggagatttccttagaaagttgctctgcttcttcatcatctttgttgctgccataagatataccacgggactgcagtctagacagatgagatccctgtaaagcttgccctgacaaaacgagatgtcgagcacggagagtattcagtgacctgcgagccaaaatcga

SEQ ID NO: 791 - DNA, 807 bp, Arabidopsis thaliana
ccattttttgtcaatctagggttcttcttcgtacttgcagatttcgcctccgttttcactacgatctgtgaagatgttctccgctcagaacaagatcaagaaggacaagaatgctgagccaacagaatgcgaggagcaagttgctcaggctttgtttgatttggagaacactaaccaggagttgaaaagcgagtcgaaagatctctacatcaaccaagctgttcacatggatatctctggaaaccgcaaagctgttgtgatttacgttccattcagattgaggaaagctttccgcaagattcatccccgtctcgtcagagagcttgagaagaagttcagtggaaaggatgttatctttgttaccacaagaaggatcatgcgtccccccaagaagggtgctgctgttcagaggccacgtaacagaactcttacctcagttcatgaagctatgcttgaagatgttgctttccccgctgagattgttggaaagcgtactcgctaccgtcttgatggttccaagatcatgaaggtctttttggatgccaaggaaaagaacaacacagagtacaagctcgagactatggtcggtgtgtaccgtaaacttactggcaaagatgttgtttttgagtacccagtcgaagcttgaaagaagatgatgaagaaccatcaggatagtgaaagagagcttttgtttatgttttgtggtatttaggatgaaggaaactctcttgattcagttccttgttcacaatctttaatgttctatttacaatgactactttttgtgtttttcaattaaaaaaaaaa

SEQ ID NO: 792 - DNA, 807 bp, Arabidopsis thaliana
tttttttttttttttttcgttaaactattttattgatttaagtagattttaagaccaaagcaaagagacataatccttcaaacaaaacaaacagtcacgcctaagaaaacatcacaaactctcgacttaatactccgattacaaataagagactgacaaactttcaacccttcactcagttgctagattgacgcaactcaggtcgaacaaagtctgcatcagcaggcacagagatatcaacggtaggcctgagctgtgcgcagacctcaatggcaccatggactggatcagagaagaagttactgattaggtctctgttgattgctgcaccactgtccacagccacaagagcttgttgggtcaggatgtagtcaaaccgtggcgcccatttcctcgaacccaatcttgctgtggttgagcagttgtcaaccatgaaggacactcccctggcgtgcataaatgggtttagagagtccacggattcaatcacactctcgttgatgatttctgagtaagagtgacctttcttcctcaagatctcaatctgagccatcataagtgctacataaactccagcggtgaagggatacaatggacccaagtcaccagcaggtctggacttcctgacgcgttcacccaccttccacattcttgtctggtcaatatttcccatagggaatgctggcaagccttccttttcatagaagcgacgaccggctaagacaacacttcggatttcgctgccactttgtacatcctcgtaacattcatagagaatctccatacaaggatagaaggatgcgctgt

SEQ ID NO: 793 - DNA, 806 bp, Arabidopsis thaliana
gagattccagtgaaatacaagggtgaaatacaaagccggcggttaacaagtaatctcagaaaactaaaccgacgattaaaaggataatctcggaagcaaagcccaaaggaaagggaaacaacaaggcaaaacaaaccttacaaacagagcaaagttgcgaaactgaaacaaagaagcagaccaaaacaaccaaaattttaaacacaacatctcgtcaaccacattaccagacaaaggaaaggcagagctttacaacaagccactccgtaggggacaaggaacttccaaccaaacggacagcggtgccacctattacgatgaagactaccttacatagaagagttccaaggaatccataccggcgagaagaactaggccaaagacgacaagtcacacctacactccggaagcggcgaatcaaagaatatgattgtttagcgcctcgaaggaaaccagccaatgaacagatgagatctcgatcagatctttagagtagagacaaggagagaaccaaatcaatctggaccataccgaaaaacaaaaacgggaggagatcgaaccggacagaaacgaaagcaaccaccaagcctggtaaaaggctaaacgagaagaaggctaaaacatgaccggatcaagaggcgctattagcaacagagaccaacccacaaaaacaacataagccatctaagaaccattcgaaaatccctacaccacaacgcacataaactaagcaaaagcaacataaactttacagcagagcaagagaggcataactccggcgctatggaagccaccagagccaggca

SEQ ID NO: 794 - DNA, 806 bp, Arabidopsis thaliana
tgctaataaatggaccgagatcgaattttcctttgaaccacaagtcttctgaaggaactagcagaggcgaatcgcctagctcaataaaaggggaagaagaatcagctgacaaggcaacaaataatgatagcgtcccaggtgtcttgtacgatctgctgcagaaagaggtcataacattaagaaaagcggcgcatgaaaaagatcagagcctgagagacaaggacgaagcgattgagatgttggccaagaaggttgaaacattaacaaaggcgatggacgttgaggcaaagaagatgcgaagagaagtagctgtaatggggaaagaagttgctgcaatgcgtgttgttgataaaggacaacaagatagtaagaccagacgtctctcggtctcaaagggaaacacagctcagctactttctggaagagtgtctggacgaatcgggatgacgaggagcacacagtgacaaactgattcgatcaatcactggttggtctctgtggcttgccttaaggttcttgtaccaaattgagagaagggattcaaaagccgaaagagataatcgtgtaaagtacctgattgattcgatgtgtgtttctctaaagcattccaacattcaaggtaaagggagacattgacttcacttagctgatatatttcttactctgttgcgttatgtatagtagtactgcagtagtagaggtagggttgttttgttcaacattttaagcttttttactctcttgttttgtgtgtgtcactctctcctcttagttaattttcttattaaaaaaaaaaaaaaaaaaaa

SEQ ID NO: 795 - DNA, 806 bp, Arabidopsis thaliana
tcaaccgataagaaaagcatatttgtactttaaagaaaacttatactaaatggctaattacggccacgtttcttgacgggtacggcatgtaacgggttggtcttgtgcaatgtgagaccgaaagtctcgtccatgtccaaatcctctgaaccgacaccgtttggaagcttccagtcaaatgaataaagaagagaagcaagcataagaggcactgttttcacagccaaaggcaatcccgggcatattctacgtccggctccgaatggtgtaagctcataatctctacctctcaggtcgatatctttccctaaaaacctctctggcttaaaccgggacgaattctcccacacgttcgggtctcttcctatggcccacacgttcacaaaaacctgagtgtctttaggcaccatgaacccaagaacctccacatctgattcagcttttcgggggactagtagcggagcagccggatgtaaccggaaagtttccttcaccactgcttgtagatagggaagtgtcgagatatcagactcttcaacaacacctttctgaccaatcacacagtcgatctcagcctgagctttcaccattgtttcagggtttcgaagtaactctgccattgcccattccacggtactagagtttgtgtctgtgcccgctccaaacaggtccaagagaaggtgtacaatatcgttaatgttgagctctgcttcatctccttcggtaagatcgagaagcacatccacaaaatctctctcccggacatctttagagttagtatcccgcaatgattttcggacgcgtgg

SEQ ID NO: 796 - DNA, 806 bp, Arabidopsis thaliana
ccacgcgtccgacgtttgagaattacgccggaccggctaagcatcaggccgtggcactccgtgttggtggagaccacgcggtggtttaccgttgcaacattatcggttaccaagacgcgctttacgtacattctaaccgacagtttttccgcgaatgcgaaatttatggaacggtcgattttatattcgggaatgcggctgtgatcttacagagttgtaacatttatgcgcgtaaaccaatggctcagcagaagattactattacggctcagaaccgaaaagatccgaatcagaatacggggatttcgattcatgcttgtaagctactagcaacaccggatcttgaagcctctaagggtagttatccgacgtatctcggccgtccgtggaagttgtattctagagttgtgtacatgatgtcggatatgggtgaccatattgacccgcgaggatggttggagtggaatggtccgtttgcattggactcgttgtactatggtgagtatatgaacaaagggttgggttcaggaattggtcaacgagtcaaatggcctggttatcatgttattacctcaacggtagaggctagtaagtttacggtggctcagttcatttctggttcttcgtggttgccatccaccggtgtgtccttcttctccgggttgtcacaatagattgtctcagccttgtatgttacgtatacgaatgattttatgtacaaactcaagatctgtaatatagtccataagccattttaagtgtacttattatatgacaggacatcttcttgaatgaaataaagatat

SEQ ID NO: 797 - DNA, 805 bp, Arabidopsis thaliana
ccacgcgtccgctcctctctcgccggacgagtcgcgatagtcaccggttcttctcgcggaatcggacgagctatagccatacatctcgccgagctcggcgccaagatagtcatcaactacaccaccagatccaccgaggccgatcttggcgccgcagaaatcaactcatccgccggcaccgttccgcaaccgatcgccgtcgtgttcctcgccgatatctcagaaccaagccaaattaagtctctcttcgacgcggcggagaaagcctttaactcgccggttcacatcctagttaactcagctggaatcctcaatcccaattaccctaccatcgccaacactcccattgaagaattcgatcgcatcttcaaggtgaacacaagaggatcattcttatgctgtaaagaagcagcaaaaaggctaaaacgtggaggcggtggtaggattatactgctaacgtcgtcgttaaccgaggcgttaatcccggggcaaggagcttatacagcatcaaaggcagctgttgaagcaatggtgaagattcttgctaaggaacttaaaggtttaggcatcactgcaaactgtgtatctccagggcctgttgcgacggagatgttttttgacgggaagagtgaagagacggtgatgaatatcattgagaggagtccttttggtaggcttggtgagactaaagatattgcttctgttgttggtttcttagctagtgatggtggtgagtggatcaatggacaagttattgttgctaatggtgcattcctcaaatgaatatgggttatgtttgtttaga

SEQ ID NO: 798 - DNA, 804 bp, Arabidopsis thaliana
ccacgcgtccggacttctaacttctacttctacttagatctcctcaaaattcaaatcggaaaaaagtttgagaaaaatctcgatgaagaagaagatgattccgacgacgatcttactctcagctctcattttctctctatcaccgatctgtgaagctgtgtggcttactgtacctcacaccggatcaaagtgcgtctccgaagaaatccaaagcaacgtcatcgttttagctgattaccttgttatctccgaggaacattctatcttccctactgtctccgttaaggttacagcaccttatggcaccgtgttacaccacagggaaaatacaacaaacggtcagtttgcattcacaacccaagaatcaggaacttacttggcgtgttttgaggccgatgctaaaagtcatggtaacaaagattttagcatcaacatcgactggaaaactggaatcgcagctaaagattgggactccattgctagaaaagaaaagatcgagggtgtagagctggagtttaagaaacttgaaggtgcagttgaagcaatccatgaaaatctgatttacctcagaaacagagaagcagagatgaggattgtgagtgaaaaaacaaactcgagagtcgcatggtacagtataatgtcgctggggatttgcattgtggtctctggtttacagattttgtacttgaagcaatactttgaaaagaagaagcttatttagatcatggatagtttcttgttgaagattactagaaccaacagtttgctctgctttctttctcttgatcttctctttggaactgt

SEQ ID NO: 799 - DNA, 804 bp, Arabidopsis thaliana
  misc_feature (1)...(804): n = A,T,C or G
ccacgcgtccgaaactctgagacagagcaagaaaaagataaagtgagtgaaaagaatggcaacggtcacgattctctcacccaaatcgattccaaaggtcactgattccaaattcggagctagggtttctgatcagaccgtcaatgtcgtaaaatgcagcaattccggccggagattgagattagcgaagctggtctcagcggctggattgtcacagatcgaaccagacatcaacgaagacccgattggtcaattcgagactaatagcattgaaatggaagatttcaagtatggatattacgatggagctcatacttactatgaaggagaagttcaaaagggaacattttggggagcaattgctgatgacattgctgctgtggatcaaactaatgggtttcaaggtttgatctcttgtatgtttcttcctgctatagctcttgggatgtattttgatgctccgggtgagtacttgttcataggtgcagcgttattcacggtagtgttctgtataatagagatggataaacctgaccagccacacaacttcgagcctcagatatacaaattggagagaggagctcgtgacaagctcattaatgactacaacacaatgagcatttgggactttaatgacaagtatggtgatgtatgggatttcaccattgagaaagatgatatcgccacacgataagatatggattatgatctcgnnntaatcatgacttttgatgtaaactgttttataaaattgatgaatgaacggggtacaatgtgtataatatggattgttcattctcttat

SEQ ID NO: 800 - DNA, 804 bp, Arabidopsis thaliana
cttttttttttttttttttttttttaattttacacccaaaaaaggtgactatatatcattatcttaaaatacaatattatacaggacacaacaaagattgttacacaatcttgagtttactttccgaccgacgaaaaaaaaagataacaatttacacaactaattgaagtttagattcaaactctcacttacaagccaaaattttcacatttaagtccatttaaggaaacttcacacttcgcttctctgcaaactgattaaccaaagcaagagcattgctagtgacttgagccacgtgaaccaccttataccgaatcagtctttgactttgcctcccatggctcgttctgagaatccatctagacacgttgtctcgtccgtcaaagcggcactgacccatgtttgaacgttactcattttccacatgaagtcctcactagccacagcatgaccagctcgagcaagttccttaaccgattgagctaaccggtccacgctattgcctagcacttcgatgcaatctttgattgctagatattccctacgtttaaattttggtgtctctttggttagtttggcgacgaagatagtaacggatttggctcgagccaagctgatgatgagagcagtctgggcgagatcttggtcattgttgtggcggatcttggtggcgtaagcagagagtgtgtgcacgcatagtgatggatattgggtggtttggcatgaagacacaataaactggtctgattccgaccggtttggggctgcagatgaagattggagaatggttattgatagaagtat

SEQ ID NO: 801 - DNA, 804 bp, Arabidopsis thaliana
cataaatcaataaagataaaaagactttccgaaacttatacctcaacaactcatacacttgaaccggtcatgtcaacatccgacttttgtagctgactgtaccagtttgatctacacaaacacacctattgactagtaaaccggtataagagaagactggatccggcttagttctggtactatgacagaagcatcacaagaagcatagacaagacaaagatcaccaaacgtgtcactccttcatcgtggagacgaggttgcgaggaggcagcagctggaagagcaggaattctaacaggttttttacaggtagaggctgaggatagagaagatgaaggccacggagcgggaatgttgtcattgaggtcacaagtaaagcttatccccgtgtctttatcaaatatcgcatccgacggtaagcttggtaatagacaaccagattcttggtttccaacttgaagagagaagtccttgagacttatatgacaaacactgaagatgttcttagtgatgttaagtttctgtagctttgtcccaaggctggttgcgcaatctaaagcttgcaagttggttataagtgtttgcttttgcaagtgagacacataactctccattgcacggcaacaacccgtttggttactcaactcgttgctacagttaccaccaatatgcttcatgtgcggaaagacaagaggacaaactctattgattttgcagtttgctaatcctctgagagtttctaacccgagaagggtcaagtttagtagcgagccagcggtttactacgttcttgcagtcattgat

SEQ ID NO: 802 - DNA, 804 bp, Arabidopsis thaliana
  misc_feature (1)...(804): n = A,T,C or G
tctcagatccgattcaagctttccgatttgcgatggacggtggagcggaaggatctcagcagcctcaccttattctagccaacaagctcttcctcctcactcatccagatgttccagacatcgagaaagtccagctcaagtctgaggttttggatttcatcagatcccatggtatggctcctttgtacgaaaccctaattgcctcttcggtgctggatttggatcaaagcttgttagagtctatgcgggccgctaatgaagaggagcttaagaagctcgacgagaagattgcagatgcagaagaaaatttgggtgaaagtgaagttcgtgaagctcatcttgctaaggctctgtatttcatcaggattagtgataaggagaaagctttggagcagctaaaactcactgaagggaaaactgttgctgttggacaaaaaatggacgtggtgttttatacgttacaacttgcttttttctatatggactttgatctggtatcaaagagcattgacaaagcaaaaaaattgtttgaagagggtggtgactgggagaggaagaaccggctaaaggtctatgaaggtttgtactgcatgtccaccagaaattttaagaaggctgccagcttattcctggattctatatcaaccttcacaacatatgaaatttttccatatgannncttcatatnnnncaccgtcctgacaagcatcataactttggacagagtttcncntaagcaaaaggtcgttgatgcacctgagatcttaaccgtgcttgggaagattccattcctttctgagtttc

SEQ ID NO: 803 - DNA, 803 bp, Arabidopsis thaliana
  misc_feature (1)...(803): n = A,T,C or G
ttttttgttttttttttattcaagcccaccacaaaaggttgttgattcaaaaggagatggcgagagagatcccaaattgcataaaagattacaaatcaataatatgaggagcgacatccacatgttattttgttcggtaaatagaaacagttatgtactcttttcatctacatacgtattatacgtgtgtgagtgtgagtgtgtggtttttactcggagcgaactctatccaacctatccacactcttcctccccctctcaatctggtcaacgctcttccgagtcttttcatggcagtcaacgctcctccgcgagcgatcaagttgatcaaacgagatcttgagcttgctgctgctgctactcatcttcgactgactctttggtggcttctctttctctctacgctctgtgctctgcctcggcttcactctcctgtccatacttctcctcgggggcgcatctctcactctctctgattggtcgctgctcatcctcggacatggtaatctctctactgttgctatgaacttcttgaggtgtctaatgtattcagggtagtgttcaagatcacagtggttccctcctttcacccagagcggcnnntacttgtctttgcagagttcccatagttgtttcccatgagannaatccactacctcatccgaagttccatgaatgatgagaaccgggcaatcgacatatgggattttgtcgatattcttgtagatgtcgaaccagtaggttttcttgacggaatacataactcttaaaccggagagaatggggctgtgaaggacgacggc

SEQ ID NO: 804 - DNA, 803 bp, Arabidopsis thaliana
  misc_feature (1)...(803): n = A,T,C or G
ttttgggataataaaagatcattactgggccattatatagtcccacggcctgnaaaaacatatacatgttgggaaggtccaattcctgactttattcatatccacagcgtattatttaattccaaacaaacaacaacaacaaatcgtttttatgcctcgtacagatccaagtatcccctcattttttatggtaaaaatttatctccacaggcaaataaataaatttaattgacccttatacggagagaaggggaaaaaatatattggattttaatagaaagaaatcaaacatgttttttgtaccttatatatgcaaaatgcagaggatgagaggaatgaatcacatcactcgtcttcgtttgccgtgaaaatgaaagtgaaaggagcgaacttgtaaccatctccttcgtagaatttgttctgaaactcaacccagtgaagacgcagcgcgtgaaggaacgcgcttagtgtctccatcaccagcaaaactcccacggttgcgaatatgaacaccaagaccccaacgatcaggatcaacggattgttgtaaccccaagcgagaaggaggaccttctcatagaagactgatgacagctccgagtgggcaagactgagagcccatagacgcaggtaagaagcggtgttggaaacagctccaagcacaaactctatggtgtgaatcagctgatgcacaaatatctcgctgaattcaaactcctcatgcccatgggatcctcctccgtttgtctctacatgaagactctcatctgtctcgtcaaaaggtgcgtacgcctggccttgat

SEQ ID NO: 805 - DNA, 803 bp, Arabidopsis thaliana
  misc_feature (1)...(803): n = A,T,C or G
ttaatctatccaacaatgtcgaagattatttcccttgtggtggcgatgatcgcagtgctagctttgccgattcgtggtcaacaacaacctctaagccaatgtactccatcaatgatgaccaccgtgagtccttgtatgggcttcataaccaacagtagcagcaatggaacttcgccgtcgtctgattgttgtaactcgctgaggtctttgaccaccggaggaatgggatgtctttgtctaattgtcactggaactgttcctttcaatattcctattaaccgcacaaccgctgtctcacttccccgtgcttgtaacatgcctagagtccctcttcaatgccaagccaatattgctccagctgctgctcctggacctgctgctacatttggaccatcgatgtctccaggaccagagacggatccaattgttccagagccaactccggcagctcagacaccacagtctgatacaacccgaccatttacaccatccgtcgacggtggagctccaacatcagacgacggaggaagcaccagtcgaccttctgagactccttcatccgcctacgcactctcaccatctcttctcttcttcagcatcgccctcgtagctctcaaattctactgatgattccttttgtttctttgcattccttatgtgatttgatttatgcatcgttgattatagaaagaaaccatttatttggtcattgctttgtggaataagcttttgtgtatactgttctctgttnnnagtgagatttattttgtgttgttgaagtaatacatcatcatttttatgga

SEQ ID NO: 806 - DNA, 803 bp, Arabidopsis thaliana
ccacgcgtccgaatcggctaagtgataatttcgaagcttgatcggtaaatccaggagcttttggatcggaatctgttcgctgatgctttggtgaaaatgggtttcggtgcaattagatcgattttgcgtccattgtcgagaaccttagtttcgcgtgccgtcgttaactactcgtctgcgccgttcaatgcgacgattccggctgctaaacccgagttatgttccttcttcggtggatcgatgactcatttgaggttaccatggattccaatggctaaccattttcatagcttaagcttgactgatactcggctcccgaagagacgacccatgactcatcccaagaggaaaagatccaaattgaaacctccagggccttatgcatacgttcaatatacacctggccagccaatttcttcaaacaatcctaatgagggaagtgtgaagagaagaaatgcgaagaagcgcatagggcagcgtcgtgcttttatactgtctgagaagaagaagaggcaagcgctggtgcaagaggcgaagaggaagaagagaattaagcaagtggaacgtaagatggctgctgtcgctagggaccgagcatgggctgaaagactgattgagcttcaacagctggaagaagagaagaagaaatcaatgtcttcttgagatcaaacatagaaataatcctaaatgacaatctcttttcttgtcttgagttagagaattactcttctttgttgtgtttggcatgttctcttgagagttaactcgctatgttgtctgaagaactgagagttacttgaaaa

SEQ ID NO: 807 - DNA, 802 bp, Arabidopsis thaliana
  misc_feature (1)...(802): n = A,T,C or G
ctgatgtactaagcgtctcatcagtggatcaaacccaaactggtttatatctggttcatgcgattccacagcacggttgtgggacactcgtgctgcaagccgagcagtgcgtacctttcatggtcacgagggagatgttaatacggtcaagttctttccggatgggtatagatttgggactggatcagacgatggaacatgcaggctgtatgacataaggactggtcaccaactccaggtctatcagccacatggtgatggtgagaacggacctgtcacctccattgcattctctgtgtcagggagacttcttttcgctggctatgcgagcaacagcacttgctacgtttgggatactntcttgggagaggttgtattggatttgggattacagcaggattcacacaggaatagaataagctgtttggggttgtcagcagatggaagtgccttgtgtacaggaagttgggattcaaatctaaagatatgggcgtttggaggacacaggaganngatttgaagaagatttaacgaaagtaggagtcacnnntccagttgttggttaatatnnncngtagtcgggaagtaaggttcggtttgtggaaggtgtttggtttgaaatagtggagtggttagaagaattaaacttccctttttgtagtgtgctttgatttatttatttcttcattgggaactaaactccttcaacacgctactcaatgtgaattctgtaatcaattgtgtacccaccagtctttactttaaaaaaaaaaaaaaaaaaaaaaaaaaaaaaaaaaaaaaa

SEQ ID NO: 808 - DNA, 802 bp, Arabidopsis thaliana
  misc_feature (1)...(802): n = A,T,C or G
gcggccgctttttttagaaaaaaggtatttgttatgaagaagtaaagttatcagatgaacataaagagaacgtccagggagactaaagaagggacgctacttaatctctcccctttcctaaaaatccataagaaaaaggaaaccaaatacaaaaaacaaaaacgacgtttcatcctcaaaacttgtctctatggtttaataaattaacaataacagaagacatctagagctcatcgtgagactcatcttcctcctcagtcgatgattctcctcctgcacctggtgctccgcctgatctctggtaaactgctgtgatgattgggttacacactgcctctacctccttgagcttctcgtcgtactcttctttctctgagttttggttctcgtcgagccactccaaggcctctttcgtcgctgcttctatcttctccttctcatctccttccaatttgtctgcaagcttgtccttgtcgctcacttggttcttcatgttgtacacgtatgtctccagggcattcctggcgtcgatcttctccttcaccttcttgtcttcctctgcaaactcctctgcctccttcaccatccggtcaatctcttcttggctcagacgacccttctcgtttgtgattgtaatcttctctgatttaccactcgccttgtcctctgctttcacattaagaataccgttggcgtccacttcaaatgtgacnnnnntttgaggggttcctcttggggccggtgggattccattgaggtcgaatttcccgagtagcctgcagtccttggtgagacttcgttc

SEQ ID NO: 809 - DNA, 802 bp, Arabidopsis thaliana
tcgagcggccgcccgggcaggttttgattccatttttattactgttactatcatccaaaaccttggtatttgtagccatgagtcttgtttcagatctcatcaaccttaacctctcagactccactgacaaaatcattgctgaatacatatgggttggtggttctggaatggacatgagaagcaaagccaggactctacctggaccagtgactgacccttcgcagctaccaaagtggaactatgatggttcaagcacaggacaagctcctggtgaagacagtgaagtcatcttataccctcaagccatattcaaagatcctttccgtagaggaaacaacattcttgtcatgtgcgatgcgtacactcccgcgggtgaaccaatcccgactaacaaaagacacgctgcggctaaggtctttagcaaccctgatgttgcagctgaagtgccatggtatggtattgagcaagaatacactttactccagaaagatgtgaagtggcctgttggttggcctattggcggttatcccggccctcagggaccgtacatttgaagacggcaaaaccaacataaggaagaagaatagatttaccgaaaggaaaagtctctcaagcacgccttttgctgagacgccatgagttaggctcgtggtaacggtcatacaacggctcaatccgttcttggcgcttacgcttgctcatttttgttgggtcagacactttgaagaaccttggagctaactcaacaagccactttgggtcaatcacagtcacttccctcatgtacctgcccgggcggccg

SEQ ID NO: 810 - DNA, 801 bp, Arabidopsis thaliana
ctagaggaacccatcacgatatcatcggcagagaccagtacccgatgatgggccgagaccgagaccagtaccagatgtccggacgaggatctgactactccaagtctaggcagattgctaaagctgcaactgctgtcacagctggtggttccctccttgttctctccagccttacccttgttggaactgtcatagctttgactgttgcaacacctctgctcgttatcttcagcccaatccttgtcccggctctcatcacagttgcactcctcatcaccggttttctttcctctggagggtttggcattgccgctataaccgttttctcttggatttacaagtacgcaacgggagagcacccacagggatcagacaagttggacagtgcaaggatgaagttgggaagcaaagctcaggatctgaaagacagagctcagtactacggacagcaacatactggtggggaacatgaccgtgaccgtactcgtggtggccagcacactacttaagttaccccactgatgtcatcgtcatagtccaataactccaatgtcggggagttagtttatgaggaataaagtgtttagaatttgatcagggggagataataaaagccgagtttgaatctttttgttataagtaatgtttatgtgtgtttctatatgttgtcaaatggtaccatgttttttttcctctctttttgtaacttgcaagtgttgtgttgtactttatttggcttctttgtaagttggtaacggtggtctatatatggaaaaggtcttgttttgttaaaaaaaaaaa

SEQ ID NO: 811 - DNA, 801 bp, Arabidopsis thaliana
aagcatcaaaaatttatctattcaaagtagttcagacgaaataaacttcataaaacaaaagagcaaacatctgagatacatatttcaatctaaatgaagataaaacattaaactcattgatacgagattgtaacgcacagggcaaaaggaaaatccttaacgattagccttggcaactctttcaatctcatccttcttcttgatggcatagctgttggaagagcccttggctgcgttgatcaattcatcagcaaggcactcagctatagtcttgatgtttctgaaagcagcttcacgagcaccagtggtaatcaagaagatagcctggttaacacgtcttagaggagagatatcaacagcttgtctcctaacaacaccagcagatccaattctggtagcatcttcacgtggaccactgttgacaatggcgtcaatgatgacctgaattgggttcaagtcagacaagaggtggataatctccatggcgtgcttgacgatcctgacagccatcaatttcttaccgttgttcctcccgtgcatcatgagagagttggtgagcctctcaacaatggggcactgagccttcctgaatctcttcacagagtatcttccagcggtgtggggaacaaaggtagcatgtttagctgcctgaactccaatgtagtcaacaagactgatgtctgtgaccgtaacgtcgtcataggtccagcggttgaagagcttgacttcgttagtgagcgcctgctgaatctcagcgtcaacatctgcggcggtggccatggctgaagatcgtttgcgtcg

SEQ ID NO: 812 - DNA, 801 bp, Arabidopsis thaliana
  misc_feature (1)...(801): n = A,T,C or G
tttctaagaaatttaatatatttgattagtaattttatattttaagtacatttaataaaagtaaaattccataaactttactaaaaattattacatataatataccatcattaaacattttaacataacttcacatatggtaacgaggcaaatgcagattttatttctagcattttttgtattattcgctttatagataaaagattctacagaggttgtggccttgactgaacaatgtaaacatcttcaccaaccaaacaaccttcaacgtcttgagcacagccaaagtttctttccaagaagaaaccaaccgaaccgagtctctgaccgagctgctgtctaaacaccgagtcaacagttaaacgttttttgctatagtccacggtcaaccgaacgtattttccatcagcaggacctgttcctgacacaagaagctcttcgctgaagtttgcgaaagctaaggtttgtacaatcccgtcgagcttaccnnnagcgagtctccatggtgttcctcttgttcctgaagctaaagtctcacctaaaccaggagcgatctcggcttccacaaggttactgtccggatcagctggactcactgtgtgcagaacgaatgataagtccggcgaaagcatttcttgaacgagaacagccattgaagcttctctttgagagacaccagcagctctacggcttnnnacagctcttcttgtgtagagagaagcccaaacttggcaaaccgaatctgaaaacaccaaaggatccgagggactcacgttagggattgattcatagagtcctgca

SEQ ID NO: 813 - DNA, 801 bp, Arabidopsis thaliana
cggccgcctccattaacaaggagaaacagagcaccaccatcctctgtttcctctgtttatctaatctttctctgtttcttcctctactttttaaatttctcaaacgctcaatcatcgccggttttcgcctgcgacgtagctgcaaacccttctctcgccgcctatggtttctgcaacaccgttttgaagatcgaataccgagtcgctgatctggtcgcgaggctcacgttgcaagaaaagatcgggtttttagtgagtaaagctaacggcgtgactcgtcttgggattccaacgtatgaatggtggtctgaagcacttcacggcgtttcttacatcggacccggcacgcatttttctagccaagttcccggagctacgagtttcccgcaggttatactcaccgccgcttctttcaacgtatctctgtttcaagccattggcaaggtcgtctcaacggaagcgagggcaatgtacaacgtgggattagccggactaacgtattggtcaccgaacgtgaacatattccgagatccaagatggggaagagggcaagagactccaggagaagatccattgctcgctagtaagtatgcttcagggtacgttaagggtcttcaagagactgacggtggcgattctaaccgtctcaaagtcgccgcctgctgcaaacactataccgcttacgatgtcgataattggaaaggcgtagaacgttacagtttcaacgccgtggtgactcaacaagatatggatgatacgtatcaaccaccgttcaagagttgtgtggttgatgggaatgtg

SEQ ID NO: 814 - DNA, 801 bp, Arabidopsis thaliana
  misc_feature (1)...(801): n = A,T,C or G
tttttagtaataaaagatatttttatgtaacaagttaatatgaaccatataatatacaaacggtacaacataaaaatctaacgtgaacacttttaattatttgtaggacattgttcagagcccctaataaaagttccttcatacaaaactgctattttaatatgtaccgtccgattaacatcatcgaacgacgatctttaaccgagtccaccataagacccttgtttgtaaccgtagcagaacccttttcctcacactactctgctacaatcagctttagcgaaacccactcttctattggtcacatcgaactcaacccaaagattttgctgatgaacgttcccgattatattactagcagctccaagcatactcgaccgtccgattccaacgcaatgaatcccacctcctacgttaaccaaaaccctctctttcggaacaagtatctcaactcctctagtgaacacaaacacaagatctcctatcaaccgtgggatcatcgccacgtttccatnnaaacacatgtcagctgttccaccgtagacgtaacnnttctttaatcttcgtcctacacgtgtcattatctctgctcttactttatcgtaagctgcnnnnnnnnnntgagtaaactcggatcccgaatcaaccattgtttgacccgacccgcctgcatcgggtctgaaaaccgaaccggaaatgttaagcttcttcaaaccaaatctaatcccaatcataggaacagtgtaagcaagaggaccaagatttggcattcgttgactttcaggaaaagtcaacaaagaa

SEQ ID NO: 815 - DNA, 801 bp, Arabidopsis thaliana
ccacgcgtccgcgagcttcgacttcgagctgtggaaagtctgccgtgccacgtcagcaacaccaagcctcttcaagccgttcagtgtagtgtcggtggacgggaaaacctcatgctcagccgtagacggcggtttggtgatgaacaatccaacagcagctgccgtcacgcacgtgctacacaacaaacgagatttcccgtcagtaaacggcgtagatgacttgcttgtactgtcgttgggaaacggtccgtcgaccatgtcatcatcaccagggaggaaactccgtcgtaacggagactattcaacgtcaagtgtggtggacatagtggttgacggcgtttccgataccgtcgatcagatgctggggaacgctttctgctggaaccgtactgattacgttagaatccaggcgaacggtttgacgagcggcggagcggaggagttgctgaaagagagaggtgtggaaacggcgccgtttggggtaaaacggatactaacggagagtaacggagaaagaatagagggtttcgtgcaacgtcttgttgcgtcaggaaagtcaagtctacctccaagtccttgcaaggaatctgccgttaaccctctcgctgacggccgttaagtttcctttattattataaccctccccgtccgtgatgtaagaagtttgtaaccaaacccctgggttaattttttaaccccagccagcatcttcgagttaattaattagcctttctttttttctaatgactttagttgaggaattaataatggttaatgaatgatagtctttacttatttatc

SEQ ID NO: 816 - DNA, 801 bp, Arabidopsis thaliana
ttttttttacaatcccaaattcacacgatatgatttaattaagcaaaggtgaaaatgatagctcgtctccaaaacttgtgcataagtaaataaaatctcgaacacaaaaagggaacaagggatagccagagttttgcaacaccggtggatttggtccataaaacgaaactaacattcaaaagacaagaaataggagctaagacgatgatatgggcattcattcttcctctacgatcttgcttttctcgctaacatagataccatcaagaaacttcctgatatccttcttcttcacgtgacatttctggttgatcaaagcgcatgaccttgaaacaagctcgatgtcgttaccgtcaagaacaatctcatccttcaccttctcagatcgaacaatggttacaccatccaacatctctaccttcctcaccttcttctcgccaaggaagttacggatctcgatagactttccgtcaccgccgatggaggcgttgatgggaaaatgggcgtacacgaacctcatcttgtaacggaaacctctggtaacaccggagatcaagttatcgacgtggctaagagcggttctgatggaggcgctggttttgcgtgttccaaaccacgaatcgatcttaagcttcttctttccagtctctggatccttgatcagctggaaatcgaggttgagatgcttgaaatcgcgaacaagcttcccgcgaggtccttcgacttcgatcactttagcgtgaaccttgatggtaacactgtcggggatgtccatcgtttcggaagaaagaatcgtcttca

SEQ ID NO: 817 - DNA, 800 bp, Arabidopsis thaliana
  misc_feature (1)...(800): n = A,T,C or G
cttcaaagttcaaactcttttttttttttttgtttgatccaaattttaacaaaattatggatcgcaatttcctcctaacagttacattgatctgcattgtcgtcgccggtgtcggtggccaatctcctatctcttctccgaccaaatctcccaccactccttctgctccaactacttcccctactaaatcccccgccgttacttctcccactacggctccggcgaaaactccaactgcttcggcttcttcaccggttgagtcaccaaaatctccggctcctgttagcgagtcgtctccaccaccgacacctgttccagagagctctcctccggttcctgcaccaatggtttcttctccagtgagctctccaccggttccagcaccagtagctgattctcctccagctccggtagccgctccggttgctgatgtaccggctcctgctccaagcaagcataagaagactacaaagaaatcgaaaaagcatcaagctgcacctgctccggctccggaacttctcggtccacctgcaccaccgactgaatctcccggacctaactccgacgctttttctcccggtccttccgccgacgatcagagcggagcagcgagcacaagngtgttgaggaatgtagnnntgggnnnngttgcaaccnnatgggccgttctcgttatggcattctaaattatttatcatttcacctctgatatttnntagtttttatatttttgaccctaccattgtctctttctttacgaatttggtaatgagtattatttaattgattatacagtttgt

SEQ ID NO: 818 - DNA, 800 bp, Arabidopsis thaliana
tcattatcaaatcaggagctcaacgtgctgcttctactcacggcattgctcttgttgctccagacacttctccaagaggactaaatgttgaaggggaggcagacagttacgactttggtgtaggagccggattctacctcaatgctactcaggaaaagtggaagaactggcgtatgtatgactatgttgtcaaagagttgccaaaactcctgagtgaaaacttttcccagcttgacacaacaaaagcatctatatctggacactccatgggtggacatggagctcttactatatacctgaggaacctcgataaatacaagtctgtatctgcgtttgcaccaatcacgaatcccataaattgtgcatggggacagaaggcattcaccaattatctaggtgacaacaaagctgcttgggaggaatacgatgccacttgtcttatttcaaagtacaacaatctttctgcaacaattctaattgatcagggagaaaacgaccagttctaccctgatcagttattgcccagcaagtttgaggaggcgtgcaagaaagtgaatgcaccgctcttattgcgcctccatccaggatacgaccactcctactatttcattgccaccttcatcgaagaccacattagtcaccatgctcaagcccttgagctatagctcacttcatctgcttggaaaccggctttgggtttgtccaagtattagtatctcaataaagcaagtggacttgtaatgttttatgttcaataactcccctgtgtgctcttttgtctacgataataataagaaaat

SEQ ID NO: 819 - DNA, 799 bp, Arabidopsis thaliana
  misc_feature (1)...(799): n = A,T,C or G
ttcggacaacctgagctctctttatgcatctccgacatcgggaggcaccggtggttctgttttctctcatcttgttcaagctcnannngatcctattcttggggtgacagttgcatacaacaaagatcctagcccagttaagctgaatttaggagttggtgcttaccgaactgaggagggaaaacctttggttcttaatgttgtgaggaaagctgagcagcagcttatcaatgacagaacaagaatcaaggagtatcttcccattgttggattggttgagttcaacaagttaagcgctaagctcatactaggcgctgacagtcctgctattcgggagaatcggattaccaccgtggagtgtttgtctggtactggttctctgagagttggaggagagtttttggctaaacattatcatcagaaaacaatttacatcactcagccaacatggggaaatcatccaaagattttcacgctcgctggtttgacagtgaaaacttaccgatactacgatccagcgacgcgtgggttgaactttcaaggtttattagaagaccttggtgctgccgcacctggttctatagtgcttctccatgcctgtgcccataaccctactggtgttgatccaaccattcaacaatgggagcaaatcaggaagttgatgcgatcaaagggattgatgcccttcttcgatagtgcttatcagggctttgcaagtggaagtcttgatacagatgcgaaacctattaggatgtttgttgctgatggcggagaatgcctcgttgctcaaagttatgcg

SEQ ID NO: 820 - DNA, 799 bp, Arabidopsis thaliana
  misc_feature (1)...(799): n = A,T,C or G
tggagtcactggagaaagtagtgctggagatttccaagaatgtggtgcatcatcttccatacagctctcgggggagccaccatggtatcctccaacattacaggataacaatgcctgctcacattcagtaacccgtaataacgcagttatgcgttacaaggagaagaagaaggctcgcaagtttgataagagagtgaggtatgcttcccgcaaagcaagagctgatgtgagacggcgtgtaaaggggcgatttgtcaaagctggtgaagcttatgattacgaccctctcaccccaaccagaagttattgaagactccttttgaaaggtacatagatatatatacatggcgaagaatcgaacaagnnnnnntttgacttatgggcagtttcaagtgagcaannnnnnaaattgtgggttagtaacaaaacaagactactgtagcatgaacagatttcaagactgactcttgtaagcaatcattcattcttgggattcaatcgtttttttttggcctcagaagcttcattcttgaccagagggattattctctgactttccttgtccaaactccggtttcttcttcttcttcttcaggcgtctcacactgatcagggttccatgaattttgttcttctcttggtagttaaaaaggcagggaaggagatttagagtaatttaaacaatatgtgattgttgtatatgcctttgtatttgtttgtatactcataaatgtttttctgttttgtactcggcattcttgtaaattaaagacattatccacattcttctatagacaaa

SEQ ID NO: 821 - DNA, 799 bp, Arabidopsis thaliana
  misc_feature (1)...(799): n = A,T,C or G
tttttttttacaatttttttttttttctcataagtgttttgctttattaaataaaccaaactatacaaagccaaaataacagaagttcttacaaacaaaggtttacatatgtattacttgaggcccaaaacgagtccaacaagggcaccgcctaaagaagaagatgggatattcgtgattccacccagagacacgtgtcgttagctggatttgcaaatacacgtgttggaggaaaaatcttaagctttccgacaacaacctccgccatatgagctacagattccggtgaaaagaaatcatcgccgaatatatcgacctttgattcttttgtnncttcaccgttaactacacaatagatcgaaaggatataatacagatcgattaagagaaaaccaaatctgattaatccacaactttttgctaaactaatcgaagctccataaaaataacagctaaaaggcaaattaaaataagcgacggaaaattcttattttcttcaactttagttaccaaactcgatgagtttttgtaaaccagtagatcaaaggaaggagctggaaaagaaacaccgttaagcgagtgatcgcttaaaacacttccaccaacacataaccaatgaaattattgaaacacggagagataacgtcggactacgccggaaaaacccaaaagccagccaacaccgctatagaagccggacgatgccagacatagagccagccatcaatcactatgaaagtaagatgctggacgaaagcctgattacatcaggatggcaaaagccagaaaaattctggtc

SEQ ID NO: 822 - DNA, 799 bp, Arabidopsis thaliana
  misc_feature (1)...(799): n = A,T,C or G
ccacgcgtccgtctcttcatcctccttctggagcagagcttagagctccatcatcaaatcctatcaatggcttcctcactcgtctcatcttttcaacccaggtcagcatttttgggagatagaaatgtgttcaaggtctcaagcacaccttttgctcaagtgggttactccagtaagaccattgagtgcaaagaatcaaggataggaaagcaaccgatcgctgtaccttccaatgtaaccattgcattggaaggtcaagacttgaaagtgaagggtccattaggagagctggctttaacttacccacgcgaagttgagcttacaaaggaagaatccggtttcttaagggtcaaaaaaaccgttgaaactagaagagccaaccaaatgcacggccttttcaggacgcttaccgacaacatggttgtgggagtatcaaagggatttgagaaaaagcttatacttgtgggtgttggttatcgtgcaacagtagacggaaaggagctggtgctaaatctcgggttttcacacccggtgaagatgcagataccggatagtctgaaagtgaaagtggaagagaacacaagaatcactgtgagtggatacgacaagagcgaaatcgggcagtttgctgcaacggttaggaagtggannccaccagagccatacaaggggaaaggagtcaagtattccgatgagatagttcggaggaaggaaggaaaagctggaaagaagaaatgatcttcatttttcattattatctacttacttatctcttcctttcaatgtttatgtgtatttg

SEQ ID NO: 823 - DNA, 798 bp, Arabidopsis thaliana
  misc_feature (1)...(798): n = A,T,C or G
ccacgcgtccgcgcgaagaaaactttcctactttgtttcaatccaaacgagtcaaaatgcttctcaagactgtttcttcatcttcttcttcagctctctcgctggtgaatttccatggcgtgaagaaggatgtgtctcctttgttaccttccatttcatcgaatcttcgagtttcttctggaaaatctggaaacttaactttctcttttcgcgcatctaaaagctcaaccaccgacgcgctaagcggcgttgtcttcgagccgtttaaggaagtaaaaaaggagctcgatctcgtccctaccagctctcatctctcactcgctcgacaaaagtactcagacgagtgcgaagccgccattaacgagcagatcaatgtggaatacaatgtctcgtatgtgtatcacgctatgtatgcttactttgatcgggataacatcgcgctcaaaggtcttgccaagttctttaaggaatcaagtttggaagaaagagagcatgctgagaagttaatggagtatcagaacaaacgtggtgggagggttaagttacagtccattgtaatgcctctttcagagtttgaacatgttgacaaaggagatgctctttatggcatggagcttgctctgtcactggagaaactagttaatgagaagctcttaaaccttcacagtgttgcttcgaggaacaatgatgtccacttggcagattttattgagagcgagtttctgacagagcaggtgnaagcnnncaagttgatctcagaatatgtggctcaactgcgacgagttggcaaaggacacg

SEQ ID NO: 824 - DNA, 798 bp, Arabidopsis thaliana
ccacgcgtccgaagaaccttcacttttctctcccactctttcttttactactctcacacatatctctgtctatatatcactttacataaacgactattccacacacaaacacacatagccatggcctcttctttctcttcacaagccttcttcttgctcacattgtctatggttttaattcctttctctttagctcaagctcccatgatggctccttctggctcaatgtccatgccgcctatgtctagcggcggtggaagctcggttcctcctccagtgatgtctccgatgccaatgatgactccaccacctatgcctatgactccaccacccatgcccatgactccaccacctatgcctatggctccaccaccaatgcccatggcttcaccaccaatgatgccaatgactccatctacaagcccaagcccattaacagttccggatatgccttcgccgccgatgccatccggaatggaatcttcaccttctccaggacccatgccaccggcaatggcggcttcgccggattcaggagctttcaatgttagaaacaacgtcgtaacactttcatgcgttgttggagttgttgcagcccattttctcctcgtttgaaatgattattgaattggtcagcctcgatcgttttcttgtaatttaccttcatttttttccctcaaattattagtggtcatcattttataatatttgagtttgtgtttgatgtacgattcagacatttgtttgcattatgtgcttaataagtttatcgttgactctaaaaaaaaaaaaaaaaag

SEQ ID NO: 825 - DNA, 798 bp, Arabidopsis thaliana
ttttttttttttttttaacaaaaaaattcattttcataattcacattccctggttttctcaattatagttattaaaccgtacaatacaattgcacaaaagccttccagagatattacaactccaacaacaaacccaaagacacataaatgatcaatcaatagacaaagattcatctaaaaatgatccaacggccagaaacccattacgatgcaaattaaaaaagcaaatcacgaaaaattcatcagattaacaacgttgaatttgacgtcttcagtaatcggtggtaggcaattgctcgtgggcattttcatcgatgaagacaaagtcgtagataattccggcgagtccaccaccaataagaggaccagcccagtaaacccagtggttggtccacgtccagcttacgacggctggtccgaaagcaacggctgggttcatggaagctccgctgaaagctccaccagcgaggatgttagctccaacgatgaaacctatggcgattggtgcgattgttccgagactaccgttcttgggatcaacggctgtggcgtagacggtgtagacgagcccgaaggtcatcacgatctcgaagacgagagcgtttaatgatctgactccggcagagagaccgaacgctgggattggctcgccaccggtggcaaagctaaggaggaaacaagcggcgacggagccaagaagctgagcaatccagtagagaataccacggaggagagtgatgttaccaccgagtaagacaccgaaggtaacggcagggttaacgtggccaccggaaatgt

SEQ ID NO: 826 - DNA, 797 bp, Arabidopsis thaliana
ctatgcattacaacgtggaaacgagatacgtaaatacccacatacaaagatacattatattgttgtagcttgaacatcatcatcaaatctaatcgggtaaataaacatcggatttgaagtgaggaagaagatatgaaaagaagagctataaagaaacgaaatttggctaacgattgaacgcaaccgaaagagcaacaccaaggacaagccatgctccaatgaagtatcccaaaatcctcgttggtcctacatcttccggttcctgaggaggtggctcttccctggatggttccatgatgtcaacctcaaatggccacacgtaccgttctgctttttcgcttcttgctagactccaatcgtacattcttctctcttccacggtcgacaatatcgtatatgactctttgataagatccatcttggtcttgagttgttcttcatctagtccttgttccttcaactctttaactctttctttgtaaccaattgtaacctgatcataagaacaatttctgaaaatcccaagccgtccataatgatcaacatctgtaattggaaggccacgtagcgcgcgttcgacgttgagagcggatattaaagatggagactctttcggtgcttcatcaacggcggtgctagatccaccttcggtttctgcctccgccgatacttcgctggagttcctagccggcgaacagataatccgcttcgtgttgatagttggcttccatgggaaagagcacgtgcttggtacgtgatggaggactgattcaccgggaatgtggactaaagatggt

SEQ ID NO: 827 - DNA, 797 bp, Arabidopsis thaliana
  misc_feature (1)...(797): n = A,T,C or G
ggaaagtgttatttatagaataaccatatagaagaaaacatttaccaaagaagacgaaaatataaaaataaagatgacatagatatcaatttttttctgttaccaaacaatgaattacgatggtcttattacgtttaattagatgtaacacttccaaacatggccttcaaaacagccacgagcttctccttagggggcaagacttccttaataaagttatttcccacgaaatcttccgaccaacgttgaagttttggaaactcctccgcggtcatgatcgtgacgcctgaagcttcttggaaaatccctaaccaatatcctatgaaatcagctgctatatcgacaaatccaattgtctctcctccgaaaaaaagtttatctccaagctccttttctaaacatttcaaaccctcataagcctctttcacttctttttctctttcactctccggtccccaacaagctttcttcactgctaacattaccttttcatccacatacttagcccaaaaccgggccatggcacgttcataaggatcttgaggcaagatcgtgtgagttgtcttccacgtatcttcgatgtattcgacaatcaccaatgattcggctatcgatctaccattgtggatgaggacagggaccnncttgtgtatagggttgtacttgagaagcatagggctcctgtttccataaacatcttcttcaatgtactcataaggtatgcccttaagttttaggaccatctctactcttttgctaaaaggacttccccataagcccagaagctttacgtgctc

SEQ ID NO: 828 - DNA, 797 bp, Arabidopsis thaliana
ccacgcgtccgactattacaatcattctcgcttgaattaacgtggacgtcattgtttttggattgttaatcaaaggcggcgttacttttttttaatataattgtttctttaggatctttgtctctggaaaatgaaggaagacgcaggaaaccctttgcatctcacgtcactgaaccatgtctctgtcttgtgccgatccgtcgacgaatctatgaatttttaccaaaaggtgttagggttcatcccgatacgaagacctgaatccttaaattttgaaggcgcttggttgtttggtcacgggattggaatacacctcctgtgtgccccagaaccagagaaacttcccaagaaaactgcgattaatcccaaggataatcacatctctttccagtgtgagagtatgggagtagtggagaagaagctggaggaaatggggatagattatgtaagggcattagtagaagaaggagggatccaagtggaccagctcttcttccatgaccctgatggcttcatgatcgagatttgcaactgcgatagcctccccgtagtccccctcgtaggagaaatggctcggtcctgctcaagagtcaaactccaccagatggtgcagccacaaccgcagactcagatccaccaagtggtctacccttaattataaacagctcacttcttctttatattgtgtgtgtttgtgtattggtgtgcttggttttgggtgtaatatacaataagagaccgatgtgaatcagcgaatgtgattcccttcgaggaaaaaaaaaaaaaaaaaaaaaaaa

SEQ ID NO: 829 - DNA, 796 bp, Arabidopsis thaliana
  misc_feature (1)...(796): n = A,T,C or G
tcattcatcaaacggtaacagctagagcatgttcaaactcatatgacacaggaactgtaagcactgcctcatgccactcgaccgtcccccaaatctcttcactgttgggcctttcaagggcaatcaccgcgcaccgaattattttgttcgtatcggaagcagaaggggaaggattgtcccaaaaaatcgccatctttccaccataatctgctatcttaacatcgacattacgggacaacttaggtagtcctttcaccttcataactttccacaatctcagcttagtgtcaaaccatcggaaagcatcaccataacagtacaaaacattctctataacacaattacaagaccaaaaccaactctgacccatctgatatccagcaaagtcccatctactttcctctagatcataagccataaccttcatcccaatcgtcaagtagaactttccatcaacatacgcgnnnnttgatagagcgccccagtctttctcccagtaagggatgggcctatgatcccaaatttgggtctttatgtcgaacacttctatcgggtacaaggaatctgcatcatcaccgtcgacacctccagctacataaatctttccatcaataacactagcagcagggtccgacctttccatctgcaggcttggagcctcacgcaacgtgtgagaccggcagtctaggatcacgactctagaggaacgcacattctcctccatgtatccgccaaagaagtagatatcggaaccaacagacgcgtgacctgaccagtgctcaagagggggattagg

SEQ ID NO: 830 - DNA, 796 bp, Arabidopsis thaliana
  misc_feature (1)...(796): n = A,T,C or G
ccacgcgtccgagggatgggacaacccagggtccacttataaatgatgcagcagtgcaaaaggtagagacatttgtacaagatgctgtttctaagggagcaaaaatcatcattggtggcaaaaggcacagtctagggatgactttctatgagcctactgttatccgcgatgtttcggataacatgatcatgtctaaggaggagatttttggacctgtagctccccttattcggttcaaaaccgaggaggacgctatcagaattgctaatgacacaattgcaggacttgctgcttatatattcacaaacagtgtccaaagatcttggcgtgtatttgaagcacttgaatatggacttgtaggggtgaacgaaggactcatatcaacagaggtggctccattcgggggagtgaagcagtctggtcttggaagggaaggatccaagtatggtatggacgaataccttgagatcaaatacgtatgcttgggagatatgaatagacactgatttggtttgttggaaaagctttagaaattgtaagtttttctcctccactcgtatccttctaataaaagcttactgtggaacataataaggattcggaggatacttcttaagaaataaagatnnntctacgaccaattgttagcatgatttttagataataatttggggtttccattttatttatctttgtttacgttatttttttctttgttttacgttaatttttgtaattcggacaatttttgctttggatatacccaaaaaaataaaaaaaataaacgttgttgttc

SEQ ID NO: 831 - DNA, 796 bp, Arabidopsis thaliana
cctttttttttttttttttttttttttttttttttttttttttttttttttttttttttttttggtaaaagagacgactttgcataactagatgaagatgtcgtaaatagacaaaagcagatgatggaagataactagagtagacaaagggggtagtatattacacagacaaaaggatcaaagaggtgaaacaaagtctttgtgtgccgtgtaatctatttgccgaagagagatttgaaccaccaaacgcccttggagtcttcaggggcagtgttggactcaggtggtgtgtcactctgaggagtcttgtgaagcttgctgatgtcataaccttcctccactgccttctccaccagctgcttatacgtctcttcctccatttgcgccgtcctgctcaatatccagagataactcctggaaggctggccaatgagagcgtgctggtagtcaggatcgatgtagagcacccagtagtctccggtgacgggaatgattgggaggaaaggagggacatagaacttgactttgagcttggcttcgtcgcttttaggatcggccttataggcgctgccttcgataaaacccctcttcccgttgctccacgtttcgttcaagacgtgtatggtaccgtcggggttaagggtgtaggtggcgcgagtgtcgacgccgttctttggctgaaaccttgatgggaaagaagcaatctcgtaccaacggcccatgtatctctccacgttgagccctttcaccacttccatctctttcttctctgtcatttctcttctttttcttttct

SEQ ID NO: 832 - DNA, 796 bp, Arabidopsis thaliana
  misc_feature (1)...(796): n = A,T,C or G
tttttttttttttttttttttgatgtctccaaaacttctgtaagaagagagtaaatannngaccaaacatgaacggataatgnnnttgcattcatcaatgattcaaaaggaaaaacaaaactacaaatccataagnangatgtaaaacaaaaagctacgataatatcactgcttcaccatatannntctaatatagaactttcaatagcgaacttcattcctcgactgcgatcttgcctttctcgctcacatagataccatcaagaaacttcctgatatccttcttcttcacatgacatttctgattgatcaaagcacaagaccgtgaaacaagctcaatatcatttccctcaagaataatctcatccttaaccttctcagatcgaacaatcttaacaccatccaacatctcaaccttcctcaccttcttctcaccaaggaagttacgaatctcaatactcttattgttaccatcaatagaagcattgataggaaaatgagcatacacaaatctcattctataaagaaaaccttgagtaacaccagcaatgagattatcaacatggcttaaagcagttctaatcgaagcacttgtcttacgagaaccaaaccaagaatcaatcttaagctgacgttttccagtgacttggtctttaatcaactggaaatcgagattcagatgcttgaagtcacgagtgagtttacctcgtggaccttcgacctcaatcaccttggcgtttaccttaatggcgacgccgtcggggatgtccatagtctccgaggacaaaatggtctt

SEQ ID NO: 833 - DNA, 795 bp, Arabidopsis thaliana
tataactaataatcactgaacagtgacaaactctcttttagaatcaaaggaactaattctcaattatcttaatcactaacctcttacaagctaaggtctttaagcatcactatcactgctttcatcatcctcgtcgttgacatggcggttactgaattcattggggatgaaaactccaggctggctcgatcttctcctagtcctcgacggaaggatattatccaaatcaacctcagccaaaggatcatcggagaaatcgctttcgtcgtcttcatcaaaaccttcgtcatcttcatcatcatcactgtcgtcttcatcatcactttcttccacttcgatcatttttccctttcccttatcctctcgcgaaatccctttacctttcctatcaacaacttcttcttcttcttcttcttcttcttcctcgtcgtcttcctcttcatcttcttcatcctcttgctcctcttcagctccaacatcgccgattacgccattctcaacctcttcagctgctttctccgataaaaccgatgattctgctccaatcgtttcctcggtggaagaattcagattctcgatttggccacttccattagtttctccgtctttggactcagaatcagcagaattcaatgaaggattaagcttctgagccttgtttgtcacattatcctggtcttgacaaaacagatccgattttcgcttcacaggaaacgaagaatcctgttgattctcaacatccgccatagatgaatcaatcttcttacttcagagactcgcgattttggtttgagg

SEQ ID NO: 834 - DNA, 795 bp, Arabidopsis thaliana
atcaataaccggtataaaccggtaagagagacttatttgaaattgaaaagactaacaattcggttcggtctaataatgtacacaaacgtccggtccgataaattaaacaggtgaacaaagcacaaagggagaaatagatttcacagttgagttataagcagagataattcatgatcatatacaataaaacaagtcccctaccaaagctggttcaaggatctggtttgccagcaattgcaacatcatcatcatcatcatcctcattatctgagccgtattcctcttcacttagttcttcatcgctagacttatcttctgaaccttcccctggctttgcatacttctcacagtattctttaactcgttgctcataagcaggacgatcacgcatcattaacgcagcagcttctccattcaatggatctgatgggtttggatacagaagaagctgaggaagaaatgtctcaaacacattcacaaggtcgaacataggactccaagtttggttaatcacatctaaacaaacagaacccgacagttcatcaacattaggatgataaattttagtaatgaaaccaacagatggagatttataaggataagcatctggaagctcaactcttatcttccacacacctccttgatagagactgtctttgggaccattgaattcaacatagaattcttgcatgccatcgttgatcgtttccactttataatcgctcatcatcagcttcatcatatccatttctctgcgtttgcttggcgaagacattttttttctctgtcggttcg

SEQ ID NO: 835 - DNA, 795 bp, Arabidopsis thaliana
aacttaatttattctcctgatttgttatttaaggttttagagttttacatcagaagttaaaatatcttacagagtaagtaaacactcaaaagtacataaacaaaggagagggactagtcatggtgttgctccgcgtggttgagatgaagagcaccttcatggttcttgtgaacttccaccttgaacttttcctctttttctcccctcttcaacttcagtagcatgttgtattttgcagcctcgccggttacctcagctttagcatgcacaacctccagaagttcataagggaacaaggagttagacctctgctgaatggtcttgacagcctgctcagcaacatgcttcacttctggatcatctccgggaacttccctccatccagattcatgttcaccttgcttgcagccaagatcggaggaagtgatagcaggggcatcactggcaggcttgaactcctgtaactctttaaagttcaaccacggcttgacccacactttggcttcgtaaagcttcttctgtcctgcctcgagaatctccagagtcaggtgatgcagtgttccggctacaacttgttctttcgccttcacaactctcgcaaactcaagaagtgcattctctttcttgttgtgttcatcgacagcgaaacgagcgaggctctcaacctcaccactgttctgattagcagggacatcgccaacacctccgactaaagccatctcttcgttgcagaagcctaaatcactggcgatcagagaggaaatgaagagggatagagagaagaaacggacgcgt

SEQ ID NO: 836 - DNA, 794 bp, Arabidopsis thaliana
  misc_feature (1)...(794): n = A,T,C or G
tttttcaagtaaatatttgtattattttgatgacattatcttaaagatttccgaaacaaggaagaaacagaacatgaaacagagcagaaacagcaacacaaacagaaacataaaaacatatcagcgtagaatctattcgatttcgatcccaagttttttccttagctcaggaacgaacttaatgatcttctccgaatcaggaagagacttagccacactctctctctccacacaccttttaccccaagnnatcagttttggacactcggcttcaatgctgaaactcccaaacttctcatacgcttcaaaccaactgtaaaatccaatgagagctatatcaacataaccgaatgtttcacctccaaagtaagtcttgtctccaagctcagactctagtgtcttgagtatctcgatgaactccttcttccccgcctcatgctcttcgcctttagctccccaaatcaacctcgctgaagcatacaccttcttatcaatgaaatctccccaaaatttggcctgagctctttggtaaggatcagaaggaagaagtggggttttgctaggccaaacttcgtcgatgtattcgatctggatgagtgattcacataccggannaccattgtngatgannnnnngtattttcttatgaaccggattcatctcgaggagaatcgggcttttgttccacagatcttgttctctgtaatcgaatttgacatttttctcttctaaagcaatcctcgtcctcattccaaacatgctcggccagaaatcaagaagaatcacctcgtctg

SEQ ID NO: 837 - DNA, 794 bp, Arabidopsis thaliana
  misc_feature (1)...(794): n = A,T,C or G
tatctctctacattgttggaaaaggatgaccgatctgtacgtatagctgctggtgaagcgcttgcagtaatatatgagttgggaactctagagaagttcgctgccgaagtcaaagggtctgctaatggatcagtgaaagaaggaggtgtctctcaggaagcattgatgcacatgcatggcttgaaagctaaagtcactaaacaagttagagagctctctgtagaggcaggtggtaaaggttctgctaagaaagatctcaacacccaacgaaatttgttcaaagatcttgttgaatttcttgaggatggatatgctcctgaaacctcaacaaaagtcggaggggactatttacagacgtcaacgtggtatcagatgatacagttgaattatttgaagcatttcctagggggtggctttattaagcatatgcaggagaatgaattccttcatgatgtatttagtttcactcagctcttaacaaagcaagaacgcagttcctggccaagcaaaggatgttagctaagaatatgaacgttgggcattacgcagctacagcaatggaggaagaatgatggctctacaattgatttttgaagaatgatggcacactcatctgctgcttttggaaaatgttgttgttccattagtacactttttcttgtttcatgtttttgatttgataattggttccaatattataaccannncttagaaatgtcttttcatttataacaattttcgaccgttgagtgtaattcctatgattcaacacttgttgtttctgttaaaaaaaa

SEQ ID NO: 838 - DNA, 793 bp, Arabidopsis thaliana
  misc_feature (1)...(793): n = A,T,C or G
atggtcttgatgttaagatagctggttcttccttgactgggaatcatccaacaactttatcaccgtcaactttagtactggattggaattgtgagaaatctcggcgaactccatatgaagtcaatgtcaccatcccagtggatggttatgatcctgttcagtttttccttacaaaactctgcgaatacaatcaaggtaacgaaggaggatcagcgaaaggatgggctatatttggagttttttcctgcgtattcctnnnngcatctgcacttttctgctgtgggggctttatttataaaacaagagtagagcgtgtgcgtggaactgatgcattgccggggatgtcacttctatcgggcttactagaaactgtgagtggaagtggacaaagctactcaagaactgaagacatcaacaatgcttttgccaatgaagtctcatgggaccgctcttccgcatcttctactcaagcgacaacaacacagagaccaagtgaaagaacatatggtgcgatctaattttgtcaagtgcctcacaagaggtactgtttcaagccatggtatggcacgcttgtgatctgcgatttctggattttgctttgtatgtttattttctaccttctagaaagaggtcaaaaagttaatagcttcaccgtgagaatgttgttttcaccagattcatgtgctatgatagaaaaagacaaagcaaacaagagttctttctttgcttaggttacaagaacaagagtatcgttataaagtcaacaaagattgaaacataaaaaaaaaaaaaa

SEQ ID NO: 839 - DNA, 793 bp, Arabidopsis thaliana
  misc_feature (1)...(793): n = A,T,C or G
gaaggaagcaaatgacatgcatgctggagaagtatatggagagaagtcaattttggccactgaagtaaaagagcttgaaaaccggttgctcaacttatcagaagaaagaaacaaatctcttgctatccttgatgagatgcgaggaagtctcgaaataagactagcagcagcactggagttgaaaaagactgcngagaaagaaaagaaagacaaagaagattctgcacttaaggcacttgctgagcaagaagccaacatggagaaagtggtccaagaatcgaagcttctacagcaggaggcagaggaaaattccaagcttcgagattttcttatggatcgtggtcagattgttgataccttacaaggagaaatttctgtgatctgtcaagatgtgaagctgttgaaagaaaaatttgaaaaccgagtgcctttaaccaaatcgatctcctcaagcttcactagttcatgcggatcatctatgaaaagcttggtgctcgagaacccttctgagcgattgaatggagtgactgaaacctcaaacaacaacaagttcccagaagcagcagctttcttcatgaacaaagagaaagatgattgtagagatcttcttgaagatggatgggacatctttgacaaggagaccgaacaagttgtttggtactgaagaatgaagttattgtacatatagggtacttaaatgctaaaaataaatggattggtttcctactcttttagaccaaaacttggattgggatttatatgtggttctagctttatttaacttatggatttt

SEQ ID NO: 840 - DNA, 793 bp, Arabidopsis thaliana
  misc_feature (1)...(793): n = A,T,C or G
tctagagctgtagtagtttcatttcatcatttataatccggtaagatttttatcacatctattgaaacaaagaccgacatattttctatcgccttagctttccttgagcttgaccagaaattcagagacatcaaaactatatcctctctgcagaaaaccagcgtggacgagttgttattcccaagaggaaatgctctatgtatgttgttgtctatgtgtctcatacttgatggatcttccacatgccagttctgtatcccacagacattaaagcaagctcccaaagcatgtttggaatgctcaacatactgactttagacccgggaatttcggaccatttcacagagatttcaaccattggtatattaaaacgcttgcacaagtacaccaattcaacatcaaagcaccaccttttcagatggacgtttgtgaaaagtctcctagcagcagcnctagtaaacatcttgaagccacactgtgtatcccgaataccaggaccagcagctaatagaaccacaagatggaaacccttcatcagaaagttgcgataccatttccttgtagcaagagctttctcctcgagatgagcacgnnnaccaaatgcgganacttgaacatcacctattttgaaatccatatccttagatgctggatttctgattgaatattcttctctggctactgcattgatctgattttcaagtttttctaggtccgttactttagttgctccatcagcatccaacatgagaagtagctgaccccgcgaatgcaacattccttttcttatagc

SEQ ID NO: 841 - DNA, 792 bp, Arabidopsis thaliana
  misc_feature (1)...(792): n = A,T,C or G
tttttttttttttttttttttttttaaaagtaatttagtgtactaatagttttgttgccagacagaacaacatcgacgaaaccacaacatagaaagaagataaagagtgagcatcaatcaaacacaccattacaagcaaagttgtgacaaaagacgaagtcgttnttgaaccatctaacacttttattccaaactctccaactttggttctgctacgtactcttcaagtagtcttttgatcaaacaagacgtctacagagcgtgataccatctccaatggaaatctgagagacctcgactcggggatccaaagccaattttttattgaattctataagagctgctctatattctctcatatgctccggaactccatcttcatcctccgccacaaaaccaaaccacaaggtgttgtcgaacgcaatgattcccccaaccttcaccaattttagaagcctctcatggaagttgacgtagcttgatttgtcagcatccgcaaatgcaaaatcaaactcacatttgtcgttcaccaattggtctaaggccttaagaccatcggaatggataaaattaatcttgtgatcaacaccagccttcttaataaactctagtccaacttcgtaagcttctttatcaatgtctatcgcggtaatacggccatcttcaggtaaagcaagagctgtagtgagaagcgagtaaccggtgaaaacaccgatctcgatagtgtttttcgcattcatgatctttacaagcatcgataggaaatgaccctcatcaaccggaacctccatc

SEQ ID NO: 842 - DNA, 792 bp, Arabidopsis thaliana
  misc_feature (1)...(792): n = A,T,C or G
ccacgcgtccggaagaaaaggacgagtagattgatttcttagacgacggagaaatgcgagtgatgagatcattgcgcggtaattccggtgctggattggttttccggccggcgaggttaaattctcttcggagcgtctttaccggttgccgtgctgtgattttgccccgctttggtggtccggaggtttttgagctccgggagaatgttccggtgccgaatctgaatccaaatgaggttcttgtcaaggcgaaagctgtctccgttaatcctcttgattgcagaatacgagctggatatggacgttctgtattccaaccgcatctacctattatagttggacgtgatgtcagtggtgaagttgcggcaattgggacttcagtaaagtcacttaaagtaggacaagaagtttttggtgcgttgcatccgacggcgttaagaggtacttatactgactatggaattctttcggaagacgaactcacggaaaagccatcatcaatttcacatgtggaagcaagtgccattccttttgcagctttgactgcttggcgtgctttgaagagtaatgcannnataactgacgctgagaatggagaagcaggggaagcgcgtaagcgtaagcatgatgatagcagtgatagccctgctcctgtaacaaccaagaaatctaaaaccaaagaagttgaaggagaagaggctgaagagannnngaagtcttctaagaagaagaagaagannnntaaggaagaggagaaagaagaggaagccgggtctgagaagaaggaaaaaa

SEQ ID NO: 843 - DNA, 792 bp, Arabidopsis thaliana
tacttacgtgtttataaataagtattacatcaacccatatcttcttcatccacaaataaccattggctataattatgacaaaaactgccaaaaccatgaatcctaagttttacttagttcttgccttaaccgcggttctggcctcaaacgcatatggtgcggttgtagacatcgatggaaacaccatgttccacgaaagttactacgttctccctgtcatccgtggccgaggcggaggcctgactctagcaggccgcggtgggcagccatgtccttacgatatcgtgcaggaatcttcagaagttgatgagggcattcccgtaaaattctcaaactggaggcttaaggttgcgttcgttcccgaatcacagaacctcaacatcgaaacagacgtcggagccacgatctgcatccagtcaacctactggcgggtcggtgagtttgaccacgagaggaagcagtacttcgtggttgctggtccaaagccagaagggttcggacaagattcgttgaagagtttcttcaagatcgagaaatctggagaggatgcttacaagtttgtgttctgtcctcggacttgcgactctggcaatccaaaatgcagcgatgtcgggatattcatagatgaacttggcgttcgtcgtttggctttaagcgataagccgttcttggttatgttcaaaaaagctaatgtgaccgaagtttcgtccaagactatgtgagaggacaactctcgatcttttactttgactactcataataaaacctctatgttttttttttgataaaaca

SEQ ID NO: 844 - DNA, 792 bp, Arabidopsis thaliana
ctttttttttttttttttttttttagaaaaaatataacttattctgcatggagaaatgatacaaatagttgtggtaaatcaaaggttgtggacatgtatggagcttttttgacatgaagagaagctgctaaacatttcactattatcaaagaccacttaagtaatgagatcttcttatgatggtacaaacctcaaggaacactatatcctatgtaaaagggggaaaaaacttcaatcataattgtaaaacataatatgacatcagcagagaaagagagaactaaattccattctcaacagcctctgtcctttgtaagacaggaagatccttatgggtgtaaacgattccattgtctccatccacaacttgtccctttcctctcattatccatcttgttgtcaataatccttcaactccaactggaccacgggcatgaatcctgcttgtgcttattcccacctcagcaccaagtccgaacctaaaaccatcagagaatcttgtgcttgcattgtggaaaacagcagcactgtccacttggcggaggaatatttctgctacttcactatcttccgtcactatgcaatcagtgtgtgcacttccatgttggtgaatatgatctatagcaccatatacgtcttctacaatttcaacggtgcaggccttggaactgtactcgtggtgaaatgattttgtttccggaatattcagttttgcacttgctcttggcccaccatacaaagtgacgcctttggtttgcagaacataaataagatcatcgagaaaaccattct

SEQ ID NO: 845 - DNA, 791 bp, Arabidopsis thaliana
tttttgaagtaaagaatttctatatttatccaaaaggactcaagcaaaaaaaaaatgaagtaacaaaacccattttttgggatttttttgacaaattattacaacagtgacaaacgcgcctccatcaccgggtcgcaccacggtttagaatcagccgatgacccgactccgactatccgacccgaccaggatccaaacccaagagttaaatccaaattcagctttatatgtcctgaattatcactataataacactccccattctgccggagatcctcgtccgtcgtcgtgccgctagtcgaagctccgttatcggaggaattttccgtcttcggtttaacggctaaattggaaaaagaatactcaacggcatcgttttgaataggaacaacaacttgagacgacaccgttttggattcgttaatctgacgatgagtttgtggatcaataccgtgactaagaagcttcctcttaatatgagtgttccaataattctttatttcgttatctgttcttcctggtaatcttccagctatcaatgaccatttgttaccgagtaagctatggagtttgatgatgatttgatcttcatcatcagtaaaattaccacgtttaagatcaggacgaaggtaattaatccatctcaatctacaacttttaccacaacgcaacaatccagcggatttaggaagagaacgccaacaaccttcaccgtgattacggatataatctacgagacgttgatcttcttctttagtccaagctcctttgtttgtgtgagctttttcaca

SEQ ID NO: 846 - DNA, 791 bp, Arabidopsis thaliana
  misc_feature (1)...(791): n = A,T,C or G
gcatgccactctagccagccgagatgtggactgttgcttgatcccggaatctccattttttcttgaaggctcgggcgggctttttgaatttatcgataaacggttaaaggagagtggtcatatggtgattgtaattgcagaaggtgcgggacaagatctgttgtctgaaagcatgaaagagtccacaactctcaaagatgcctctggaaacaaacttcttcaagacattggcctatggatctcccaaagaatcaaggatcattttgccaagaagatgacccttaccctcaaatatatagatccaacctacatgatacgagctgttccgagcaatgcatcagacaatgtatgctgcacgcttttagctcaaagcgcgnnncatggagtgatggctggtnacaatggtttcactgttggccttgtcaatggaagacatacnnncattcccttcaataggatcacggagaaacagaacaaggtggtgatcactgacagaatgtgggcgaggcttttgtcttcgacgaaccaaccgagtttcatgaagcaagctgacaagatccactcaaaccagttggttggtgaaccagggaccatgaaatggtgatcaacactgtctacaaaaacattcgtttgtgttttgacttgaggacatctttgtttgggaagtaaggtttcttaatttaatagaaagcttttcaaaaattgttttataatattcttcaagcaaagagaagagagagagataactcttgtgagaataatgtaacaactcttggttccaactacaactt

SEQ ID NO: 847 - DNA, 791 bp, Arabidopsis thaliana
actcttcctaacatcatcctccccaaaacctaaagctgcatccaaagcagggctcccttgccgagtcactgtgtacttataaggcaccaaattcatcccatctctcacagcattcacgacaacacactccgagatcgcgtaataagcaactttatccaaagtactaacaggtccattgataaacacaataggcttataaccaccaggtctcccaaatttagaattgatctcatcagcaatcaaatttatctgtttctctacatcttgaacatccttacctgaactacgagcaggattagtaatctgcacgagaaccactttcccacgaagctcttcgttctgttcaagaagctgacccatcgcccaaaacttcaagctaatacctttgaacatatccaaatcatccacacctaacatcacaatgttccccttgaacctttctctcaatctcttcactttctctgcagttttctccgaagcctttatcgattcaatctgccccatatgaatcccaacgggcaatatcttgatgctcaccgttcttccaaaatattcaagaccaatgtagcctcttttagattcgtaatcaagaccaagcatcctactacaacaagacaagaaatgcctagcgtaatcaaacgtgtggaaaccaaccaaatcgcaattcagaaaccctttgagaatctcgtctctcacaggaagagtacggtaaatctccgacgaaggaaagggactatggaggaaaatcccaagctttatccgatgaaacctgacctgcccgggcggcccct

SEQ ID NO: 848 - DNA, 790 bp, Arabidopsis thaliana
  misc_feature (1)...(790): n = A,T,C or G
ccacgcgtccggaaaaatcagaaaaggagagaaaaattaaaaaagtctctcttttctctttttcttcttcgtctcccatattctccgatcaaaaatatatttctctctcactttccttggttttctcggcggcttcttcttctcctatttctccctcaaatcnnntnctccagttttcttgggataaatcttcctcctttctgcagacgccatgtcggacaaaggtcgtcccttgccaaaatttggtgaatgggatgtgaatgatccagcatcagcagaaggttttacagtgatattcaacaaagctagggatgagaaaaagaccggtggcaaaccgggatcacccggtaaatccagtgagggtcatgttaaatctggaggaggagatcctagtaaacctcagcctaaaaaatggctctgctgcatgcaagctccagctgtggactcttgacagacacaaagatggatttgcttgctgctaaaaaaaaagtcacagtgcttacacatctaaaagcaatggttctttttatgttttattgtcgtctttcttgaaattacccacacacacaaaaaaaaaaggttcctaagatgatttggagctcacccacctttagtatcacgattatgattccttcttctttgaagttgtttcttcttcttaaaatgctgtaaaatcgtgtctccattttattggaaaaaaaaaaggaagaaaaacgaaaaaaaacacagttactgtgtctatatgtaatgattctcttggggtcaaaaaaaaaaaaaaaaaaaaaaaaaa

SEQ ID NO: 849 - DNA, 790 bp, Arabidopsis thaliana
ttttttttttttttcctaaactgttgttgttcagccaaagagcagatcaaacaccaaaaacacagatgcttagggaaatgagaggtagatttcccacaaataaatttgctacattagaggatcaaataatactatacataaaaccagaagtgcattcagttcaagatttattctcttcttttcgctttacatttgcatggctagggagcggacacagctcagtactcccttactcatttgaattgctagctcacctgtaaaatatatatctcagttgtggaggcactgaaggaattccctcagaagcattcagaggtcaccatttgccagtgtttcatgactggattttctgtcatcaatggacacggccagaccgttgcggttctcaaacttgtgcagctccgattctatggttttggctatcacacaacgttcagcttcaggctcaggaaaacccacgtggaatgatccttgctttgcaggttctgcttgtccttgggtttcataatggtgcttcacatagttgtatagctgttgatggaagggatgattgatagaaaaacaatttgcgctctgagtgtggtgagatgacccagagcttccacttctacagaaatgtggcagggatgtgaagtccataatcttcaataattcatcccttccgcaaccggataagacatgaacttttttccttgtcctctcttgtaaaagaggttttacaaccttccaacatgcggaaaatatatatggagcgttcacaacatagtacgtgtttgtcttctctggatag

SEQ ID NO: 850 - DNA, 790 bp, Arabidopsis thaliana
  misc_feature (1)...(790): n = A,T,C or G
cggtgtatcgtttgcgtccggaggttctggttatgatcctataacaccgaaacttgtggcagtaatatcattagaagatcaattgagntatttcgaggagtacatagagaaagtgaagaatatagttggggaagcaagaaaagacttcatagtagccaacagcttattcttattggtcgcaggcagcgacgacatagccaatacatactatactctacgtgcaagacctgaatacgacgtcgattcatacactactcttatgtctgactctgcctcagaatttgtgactaaactatatggatatggagtgagaagagtagctgtgtttggtgcaccaccaattgggtgtgtaccatcacagagaacgttaggaggaggtatcttgagagattgtgctgataattacaacgaagcagcaaaactttttaattcaaagctctccccaaaattggattcgttgcgtaaaaccctaccgggcatcaaaccgatctacattaatatctatgatcctctttttgacatcatccagaatcctgcaaattatgggtttgaagtgtctaataaaggatgctgtggaacaggagccatagaagttgctgtgttgtgcaataaaatcacatcttctgtatgtcccgacgtgtctactcatgtgttttgggacagttatcatcctacagagaaaacttacaaagtattagtctcactgttgattaacaaatttgttaatcagttcgtctgaattaaaaactattttcacggcataatgattgattatattttatctcatctt

SEQ ID NO: 851 - DNA, 788 bp, Arabidopsis thaliana
  misc_feature (1)...(788): n = A,T,C or G
gaacgcaaacgtcgcacttcctgggaatcgaaagcaaatgttcacaagaagaggttcagaagaatgagggaaaagcaagagttattgcgtaatgtcaatgcttttgctgcaaacatgtttacgagctggcatgatgagtttgatgacgatggtccctcatcccggaagcaaacctcgtggttcaaaaaacagtactccaaggaacccaaaggaaaccagaataacaaacacggcccctacacttggggtaaaaggaattttgatttttgcgaagttgatgaggactttgatgtcgactatgtattccgaactgcttttggaggatcccgaggtttctctttttcattcactcatgaagaggatgaacctcgatggcggcatcactcttcaaggttttccaacaactctaacaggtcttggagatcgaaatatcggttagatgaagatgaagaagaagaagactatacttcagactccagtgactctgagtctgagccaaaccaagtttctcatagacaagcacttggcctgagtccctcaggtcccttaaaccttaaagatgtcaaacatgcgtatcgaacttgtgcattaaaatggcatccagatcgtcatcaaggctctaccaaggaggcggctgaagcaaagttcaagctctgcagtgtggcttatcaatctttatgtgaaaagctnnntgtgaactaagagttagataggtcttgattacttagagatacctcattacaataatttccgaattgtttcattttggctttgttcaagcaaaattg

SEQ ID NO: 852 - DNA, 787 bp, Arabidopsis thaliana
tttttttttttaatctcataactcgtgaaaacttttattagtcgaaattgttctcacgtgcgcattttatactttcttacatatccatatatatatccccaacatggcaacatgcataatcagatagaactcacaacaccatcgtcgttctccacaaccctaattcgtggattcacaaccctacaattttgtctaatctctccttgagttccagtcaaaggtctaagatttcccatcctaatcattgcgtcaatgaatgctcgaaagaacacggacatgtcgctgctgtattggtttactaaagggatcgtatcggctcctggagtcgaaaagagttcctggtcactctgaataagacctttcccattacgaaggttggtgtagtattgactatcgaaagcatctggagtcacgacatcgaagttgaccagaacggtgccgtttccgttttgaggacacaatcgacggagttcgacaaggtaagttgggttcagacttgggtctggactgtttgtaccattgaagttgtagagacgaggcgtcacgaactggcattgtgctcttccaaatgtgtgaccaccggaaagagcaactagatcggaagtgcggtttaggccaacgtcagcaaaggctgttttaagttgagtaagattgaaaaacggagagggcacgtcccgaagtagaaatcaggcctcaactgagcattagagtttgatgcttgaagcagaaggcaacccaaaattagggctccaatagcactgcaagaaaatgaaggagaaaaccccat

SEQ ID NO: 853 - DNA, 787 bp, Arabidopsis thaliana
aagtgttccaaacacaatcaataagcttgcatctcataagcttcagtcgaccttagctgtcagcttacatgcgccaaatcagagcctcagggagaaaattgtaccaagtgccaaggcttatccgctggaagcaattatgaaggattgtcgtgattacttccaagaaacaaatagacgagtctctttcgaatatgcccttctagctggagtcaatgatcaagttgagcatgcggtggaacttgcagagctactccgtgaatggggtaaaacttatcacgtaaatttgataccttacaacccgatagagggatcagagtaccagcgaccttacaagaaagcggtcctagcgtttgcagctgcgttggagtcgcgtaagataacagcaagcgtaaggcaaacaagaggacttgatgcaagtgctgcttgtggtcagctgaggaataagtttcagaaaagccctttgcttactgagacggatagtcaagagtctcagccagatgcagaagctgtcgcttgttgatgtcctggattgcacaaatttccggttttgccattggatggctctgttcaactttggtttgaagaggagacatggctcgtgagggttggttggtcagtgtgcaaccaaggatgaagagattgaagcacgtttgagatgtgacgactttgacgataggtgtgatgatatttactttggttaataattatgacaagggaactaacttaaagtattgttgttactcagtgaatgatgtcaaatccataaatctatatttcaaaattccta

SEQ ID NO: 854 - DNA, 787 bp, Arabidopsis thaliana
gtgaacgctcaaactccatcgctctccgagcaatatcatttggagaaagaagtgaagcaagacacaagtgcaaagcctgttgaagtgaaagaggtggcaccagaagttactacacaagctgaagaggttaagacggagcaagctaaggaagaatctcctgttgaggaagcggtttctgtagttgaagagaagtctgaatctgctcctgaatcaacggaagtggcttctgaggctcctgctgcagcggaagacaatgctgaagagactcctgctgctgctgaagaaaataatgacgaaaacgctagtgaagaagttgctgaagaaacccctgatgagatcaagcttgagacagctcctgctgatttccgtttccctacaacaaaccaaacaaggcattgtttcactcgctacgttgaatatcacagatgtgtagctgctaagggtgatgatgctccagaatgcgataagtttgcaaagttttatcgatctctttgccccagcgaatgggttgataggtggaacgagcaaagagaaaatggaacattccctggtcctctaccctgaagaaaaatcatattgccatcattcctcttttgctgttaccttcatgagattacactgcagagtttaataagattttacaaaaccagcacttctggttcccatcatcataaaatgtgagaatttaacaaaactttatgaatctcaaatttttctcttatataagtttttgaggatcatctgatttttctgaattgttgttcttcctgattatgctttactatgg

SEQ ID NO: 855 - DNA, 786 bp, Arabidopsis thaliana
  misc_feature (1)...(786): n = A,T,C or G
ttttttttttttttttagtttagaacaggcctttattcatcattccacttataacataaagcttaaatccatcttagttcaatacgangtttgatagttaacttaataattggtagctttattggcataagagacttgaagcttccatttcctctcaggcgacttagacattgaggcggatgaattgcaaacttttgggagagtagtctttcctttgtatgcattgcagatttgagctacgagatcatccgtactttgtacgctgtcatcgagtggcttgccgttgagtgtgacccatggtacgtattcatgtggcggcttcaaattcttggttttggttgcgtacccaagtatcagctttctagaaagatcaccattgtaacaatcattgattgctttctcacgtccagagtttttaacacatgattcccagcctttcgtatcgctttcgacgcaccgtatgaacgagtattgtgatttctgatcgggccaagttcttaatgcgcaagcttcaagggcgtttagtttgcattcctcttcaccatgctggcaagtgacagtcagattatcggagagttcggcattaccaaatggaaacagcttgagatcagtgattgtgtagagatcgtagtcaaagattttacctaggtcatcgacgatgaattcctgacaaccgggacaaagtgattcgtagtaaagattgagcttcactttgccagattttccagccacaaggttgtccgtgaatgtgagcaggaggagacaaccaaagaacacaagcttggt

SEQ ID NO: 856 - DNA, 786 bp, Arabidopsis thaliana
ctcttaatcttccttttcaccatcccatacattcaaagccagcccactgctccagctccaaccactgaaaaaagtcccatcaatctcacagcgattcttgaagctggtcaccaatttaccacattaatacaactcctcaacacaactcaagtcgggtttcaggtaagtgtacaactcaatagctctgaccaagggatgactatatttgccccaacagataacgcattcaacaagcttaaacccggaaccctaaacagtctgacatatcaacaacaaatccagctcatgctctaccatatcattccaaaatactactctctaagcgatcttctcttagcaagtaatcccgttagaactcaggctacgggacaagacggaggtgtttttgggttaaatttcacaggacaagcacaaagcaaccaagtgaatgtttccaccggtgttgttgagactcggatcaataatgcattaaggcaacagtttcctctagcagtttacgtggtggacagtgtgttgttgccggaggagttattcggaacaaagaccactcccaccggagctcctgccccgaaatcctcaacttcatcgtctgatgccgattctccagctgctgatgatgagcacaaatctgccggatcaagcgtgaagaggacaagtctagggattgttgttagctttgcattgttttgttgctcggttatatatattgcttgaacctttaactaaaagcgagggaaacgttcccgaaaaacaaacatttatttgcatgaaaaaaaaaaaaaaaaa

SEQ ID NO: 857 - DNA, 786 bp, Arabidopsis thaliana
ccaagaacaaattgataaatctaatggcagttttcttgctgaaatatgtcaaaagaaatcgaactccagataattactctggtcagacttgacactagtagatgtggctgctgctggagtagcaggcgcactctcataatcaaccggttttggtatctctggtgggctagcgcatcgaaccaatgcccaattcactccttcaaagaaaggatgttgcttcatctcagttgcaccacgcttatacgctaatctatgctgaggctctttcacaagcagactcctaatcaaatccctagcagcaaaactgacaactggagattctgggaaacgcagaggctgacccacaacgttgaagagtgttgctcggtttcctgaccctttaaacggggttttaccaaacaatagctcatacaaaaagatcccaaaagtccaccaatcaaccgcactcccatgcccttcacctttgatgatctcaggagctaaatactcatgtgtgccaacaaatgacattgagcgagcacttgtgggctcagcaacgagctcgggcaatggacttacctggtttccagtttcgtttttcattttcttgtctttcttggatttacttgagaaataacgtggagaaaagcatgttgtaggagcagaaatgcaagatggctgttggatgcaagcaggttgcgcacaataacccgagttcttttgcccttcagacgcaagaacagttgatctgaccactgtggggctaacagtacatctcaaggagaggtcgaagtcagaaagcggccg

SEQ ID NO: 858 - DNA, 785 bp, Arabidopsis thaliana
  misc_feature (1)...(785): n = A,T,C or G
atctcactgattacattcataataaaattcaagtagtaacgtaacatcacttccctaaaatgttcctcgttaggacgcttatttcctacaaactcaaaatgcaaagagaaagattannagacatgctccacatgttccggggatatgtgtgcacttgcttcgacttggaaccccgatttcaaacaaacaaacaaaatgataagaccacacaattccatgaaattaaaatagcaattatttttcttctnnnnnnnnnttggaaaataagttttacttcttcggaacaccaagccttagacgaaaatcttcttccataagaggaagcccctcacgtagcttcacctttggttcccaaccaagaacttctttagctttgcttatgtctggtttcctctgccttggatcatcaggtgtgttctctaccatctttatctccacgtccggtttaataagctctttaaccgtctcagcgagctcaaccatcgtgaattcgcctggattgcctatgtttatcggtccggtttggtctccttccatcaaacgcattagaccttccaccatgtccgaaacataacagaaactgcgggtttgtgttcccggtttctgaacagtcagagcttctcccctgagagcctgagcaatgaagttgctcacaacgcgaccatcatcaatgttcatacgaggaccatatgtgttgaatatcctcgctatgcgtatctcaatcccatgttgcctatggtaatcaaacataagagtctcggcaacacgttttcccggacgcgtgg

SEQ ID NO: 859 - DNA, 785 bp, Arabidopsis thaliana
tttttttttttttttttttttttttcttattcaaatcacattcattgatagagttacgaggagagacagatcgtacaaagcaatcactcttacatgaaaaaaaaaagacaaatggaaaaagaaactgaagagttaacttaaaagataagagcccagacggggaagacgacgagacagatgatcccgacggtgttggagataccattggctttagtaaatgcatttctgaatccacctgaagctctaatgtgttcttgaagcaagtaacatccaatacctaaacatatagctaaaccaatccaactgtctctgaatgtgccagcaatcaaatttggtgccaccacggcgagaagaaccaaagccaccggtaattccaggtattctctggcgtgtttaggaaagaagagttgtacaacaacagctacgaaagcaatccatttaccaatttctcctctgaaaataccaaagatcaaggaaggaagactgaagaagatgtaaggaatgagaagtgatgtgagcatattcgtcttccaattggttcgatccaacaccaacaagtatatggcggcgattgaagcaacccattcgaggacagaggtaccaaagcctaaaccagtgagtgtgaaggcgtgtgtagctaggttcttagcagcgatagtgagctcgttgaaatcggatccgatcatggccttaagggttccatggtcattcctcaacgacttcataggcatcttttcttgccggagaagagagaactatgaataattgatgtgagaagagaagag

SEQ ID NO: 860 - DNA, 785 bp, Arabidopsis thaliana
acaagtcacttcgtggaccccgtggagccatgattttcttcagaaagggtgttaaggaaattaacaagcaagggaaagaggttttgtatgattttgaagacaagatcaaccaagctgtcttccctggtcttcaaggtggtccacacaaccacactatcacaggactagctgttgctttgaaacaggcaactacttcagagtacaaagcataccaagaacaagtcctgagtaacagtgcaaagtttgctcagactctaatggagagaggatatgaacttgtttctggtggaactgacaaccatctggttctagtgaatctaaagcccaagggaattgatggatctagagttgagaaagtgttggaagctgttcacattgcatccaacaaaaacactgttcctggagatgtttctgccatggttcctggtggaatcagaatgggtactcctgctctcacttccagaggctttgttgaggaagactttgccaaagtagctgaatacttcgacaaagctgtgacaatagctctcaaagtcaaatctgaagctcaaggaaccaagttgaaggatttcgtgtcagcaatggaatcctcttcaaccatccaatccgagattgcgaaactgcgccatgaagtcgaggaattcgctaagcagttcccaacaattgggtttgagaaagaaaccatgaagtacaagaactaaactgtttcaccccacaagtgttttctgttatgctttgaattcccatggaatgtatagatgatacatgtaaaactctattttcac

SEQ ID NO: 861 - DNA, 785 bp, Arabidopsis thaliana
cacttatagagtttcagtcatggccgcctccgcagaaatcgacgctgagattcaacagcagcttaccaatgaggttaagctcttcaaccgttggagctttgatgacgtttcggttacggatattagtcttgtggactacattggtgttcagccatcgaagcacgcaacttttgttccccatactgctggacgatactctgtgaagaggttcagaaaggcgcagtgcccaattgttgagaggctcactaactctctcatgatgcacggaagaaacaatggtaagaagttgatggctgtcaggatcgtcaagcatgccatggagattatccacctcttgtctgacttgaacccgattcaagttatcattgatgccattgttaacagtggtccacgtgaagatgctaccaggattggatctgctggtgtggttaggaggcaggctgttgatatctctcctctaagacgtgtgaaccaagcgatcttcttgcttacaactggtgcacgtgaagctgcctttagaaacatcaagacaatcgctgagtgccttgctgatgaactcatcaatgctgcaaagggatcttccaacagctatgccatcaagaagaaagatgagattgagagagttgctaaggccaatcgttaagggatctccctttcctctaagtttgcattatatcaaagagtttttgtgttgtttccattagctttggatatgtttcagatgatctctctatctttaatgaaattttgacgcttataatcgacttgggatcttgatcatcaaa

SEQ ID NO: 862 - DNA, 785 bp, Arabidopsis thaliana
ttttttttttttttttttttttttttttttttttttttttatagaacattacatatttatttcatcagacagttgagaatccgatagaatatgtctcgcaaaccggaaaacaaacgttaagtccggaaattaaaacccaagaaagaagaaaaaagcagaaaaacaagggataaaatcaaagatgggggataaagttttgaggtttacacaaaagcaaagggaaattaaccggtgaagcttggtggcttgtaggcaatgaaactgatgcactggacttgacgggtgttgtcgaatccgatgatcctaatgaaggcattggggtactccttcttgcactcttccacttccttcaacacttgagcggagtcggtgcaaccgaacaagggaagcttccacattgtccagtaccgtccatcatagtatccgggtgagttaccgtgctcacggtacacaaatccgtgctccaactcgaattcaacacaaggaatccacttgttgcggataaggtagtcaacttccttagccaattcggaatcggtaaggtcaggaaggtaagagagagtctcaaacttcttctttccaatcggaggccacacctgcatgcagttaactcttccgccgttgcttgtgatggaagtaatgtcgttgttagccttgcgggtggctgggaaggcagcggaggacttaagtccgttgaaaggagcgaccatagtggcctgagccggagaggcaaccatagtagcggaagagagcatagaggaagccattgttcttcggacgcgtgg

SEQ ID NO: 863 - DNA, 784 bp, Arabidopsis thaliana
  misc_feature (1)...(784): n = A,T,C or G
gtgtgctcttagcctttactctatagttttatatcatatcaatcgacatggcgaatgtggaccgtgatcggcgtgtgcatgtagaccgtactgacaaacgtgttcatcagccaaactacgaagatgatgtcggttttggtggctatggcggttatggtgctggttctgattataagagtcgcggcccctccactaaccaaatcttggcacttatagcaggagttcccattggtggcacactgctaaccctagctggactcactctagccggttcggtgatcggcttgctagtctccatacccctcttcctcctcttcagtccggtgatagtcccggcggctctcactattgggcttgctgtgacgggaatcttggcttctggtttgtttgggttgacgggtctgagctcggtctcgtgggtcctcaactacctccgtgggacgagtgatacagtgccagagcaattggactacgctaaacggcgtatggctgatgcggtaagctatgctggtatgaagggaaaagagatgggtcagtatgtgcaagataaggcgcatgaggctcgtgagactgagttcatgactgagacccatgagccgggtaaggccaggagaggctcataagctaatataaattgcgggagtcagttgnnnnnncgataaatgtagttttacttttatgttccagtttctttcctcttttaagaatatctttgtctatatgtgtacgttcgttttgtcttgtccaaataaaaatccttgttagtgaaataagaaatgaaata

SEQ ID NO: 864 - DNA, 784 bp, Arabidopsis thaliana
atagtggcaaaagagcaatggtgatttctagtttaaagaaagcgaatatctctgcttcgaggaagcagagaattaagctagagattaatggagaaaaggagctgactttcagtgagtttttgaaacacccatctggcatggaggctgtgatcaacgcaaaggctttgcagagttaccatttagttgatgatagtgatgatacttacagatgtacattgccaaaagttcagttaatgagttttgaagtttatccagtactggttttaagggtcactcccacacaggaagattgtacagttgagctgctttcctgcaagttggaaggatcagagttattggagaaccaaagtgaaaggttttcagcaataatgacaaactgcatgacttggaacatggaacatccagagccatttttggaagttgacgtgagattgaatgtcactctagagatctcaacgcgaccgttcacaatgcttccagtatcagctgttgaggctcctgggaatctagtaatgcagacactggtcgatacactggttccccttctgcttcagcaattacttaaagattacgacgaatggattaaaaaacagcaacggaactccttaaacgcaacttcttaatctattaccaatgttttgtcaaacggccgaggcaggatttgttgggtcgttttggccgtttgagattacagcgtgtattagagatagctctgaattactgcaaaaagtacaaacaattaaatgaacaaaatagatttgattcacttgtaaaaaaaaaaaaa

SEQ ID NO: 865 - DNA, 784 bp, Arabidopsis thaliana
  misc_feature (1)...(784): n = A,T,C or G
cagagtttttattatccacgaacgtgcaaccctcacgaaagtctttacaacaagagtcccaataatcaaacgtaataagaaaaagtgagtanaataaatccttgataggcataacaaaagcatccataagaaacctaaatgagcaaatcagtcacttggtaaaatatgcaaaacaacaaaagatgacttagacttgaagacttagtagtagtactgtacattcacacgtaccttcccttccctgtctgtctctgttcgggaatcagtgatgtcccacgtcatcaatcattcagacaacgattgtgccacgtcattcaactacagtcacctcctgatcaaccttccagtagttagtgtcgttgtactcctgcatactatcatcagggctctcctttcccggtgaggctgtggtggtgttcctcttcatcggtcctgcttctcccactatgccttccttgagagcttgatccattgccctttcagttccttctggctcaactcccacaaactcaacatcttttccaaacaatgaaggtacaggtggtgatctcgggctaatctcaccttctgaggatgaagaaccgtttgggattctcacatcaggcatcttcacatcatctgtacttcccggtgcaatggctgaagatgaatcattacgttcaacccattcaggtgacaattcatctgtacccacatcttcatcaatctcgatatcagcgtctacagagactgcttctgaggttgaggctgtggctgagttgagtcaacaaaagggttcttgctt

SEQ ID NO: 866 - DNA, 783 bp, Arabidopsis thaliana
tagagataaaaagcaaaagggttccgagatggatgctatgaaagaagagattcaaagagttaaggaacaagaggagcaggccatgagggaggctcttggcttggcaccaaagtcctctacaaggccacaaggaaatcgccttgataagcaagagtttactgaacttgtgaagaggggttcgacagcagaggacttaggtgcagggaatgctgatgctgtgtgggttcacggtcttggatatgctaaagcaccacgaccttgggaagatccgagcacccttgcatcctctcagaaagaagatgcagattcagcacgcttaccagcagatacatcaggggtcaaaactgttgaagatggaccggatgatgttgagagggaccaaaagaaggataggcgtgaggaaaggaaacctgcaaagagagagaaggaagaaagacatgataggcgtgaaaaacgcgaaaggcatgagaagcgaagcgctcgtgattcagatgatagaaagaagcacaagaaagagaagaaggagaaaaaaagaaggcatgactctgattctgattgaagcgaattgtcccaggatggaacattttgctcttcagaggaagagtggtcggctaggtaccaaaatccagctaccacttctgcaagatttaaatctgttgcttatttcatttacgaatcgtggagtaaagtgttgttgaacattgttgaaaatgtttgttaaaacacatgaaaaatgtggtttgatattataacaaaccgagacgctcgttttagctaaaaaaa

SEQ ID NO: 867 - DNA, 783 bp, Arabidopsis thaliana
  misc_feature (1)...(783): n = A,T,C or G
ggccgcgaaaatcaaaatcctccaaaactatggctctgattttgccctgtacattttgtacttcgcttcagaagaagaattttccgattaatcggagatatattacgaatttccgtcgaggagctacgactgcgacgtgtgagttccggattcctgtagaagtttccactccatcagatagaggatcgttggttgttccttcgcacaaagtcactgttcacgatcgacaacgaggagtggttcacgaattcgaggttccagaggatcagtatatattgcattcagctgaatctcagaacattagtcttccgtttgcttgcaggcatggttgttgtactagttgtgctgtacgtgtaaaatctggagagctgaggcagcctcaagcattgggaatatcagcagaactgaagtcccaggggtatgcacttctttgtgtgggtttccccacatctgaccttgaagtagaaacacaagacgaggacgaggtctactggctacaatttggaagatactttgctcgtggaccaattgaaagagacgattacgctcttgaactcgccatgggagatgaannnnaaccaaaagnnncatgtaaactgtaaagtggcagactttctgtattagaggtgactagtgagttcaactttcttagtcctgaatatcgtggtgcatcctcgtaaatctcttactgaactcaacgatattccgattaaacttctcaacaattcaacatttcatgaaaaactttacaatcatttaacaataaactccaaatccgaaaaa

SEQ ID NO: 868 - DNA, 783 bp, Arabidopsis thaliana
tttttttttttttttttttttttttttttttttttttttttttttttttttttttttttttgagatgcatcaggaattactgtatataagatatcaacaaaaatttacaacagaaaaataaaagtcatttcaaacatgaaaccaagccctcactgtttaaaacaagcaccacaaggctaaagtgtgtcaaaagaacagcaaacagaagcctgcaatgggttttagattgatcagacccgaaggatctatcttccttgaaagtataaagccaagtactcgagctaaatgcagaatcaagccttgacccgaatcacgaaagagcatgtgggaaggcttgatatatctgcagagacagcacaaggtatccccaagttggagaggacacctctaatgattccacacgggaaatagaggtacatgctcaccgcttgtgcagctttgctttcccctggagtagaaggatcttcggtttcattctcagatgaagggtcaattgagacacgagacaaccaccggaacttgttgtcttgtaatacaaaagtaccccggtgatttgtctttaaattatcaatctgcttcttgaagacctcagaccagaagtctttgcagataaacttgattgcctctagatggtcactgaaccttggtctttccatagtgtacctctcggagagctggtggccgacctgataaccaatggcctcgatcctccgagcggcgagttccggcttgttagcatagaatcggccactgtacatcgccaccatctccattaacatagtg

SEQ ID NO: 869 - DNA, 783 bp, Arabidopsis thaliana
  misc_feature (1)...(783): n = A,T,C or G
ccacgcgtccgcggaagaagatatcacacagattgtctccacaaatttgattggatcaattctatgtacacgaggggctatagatgtgatgagcagacagcacagtggtggacacatttttaacatggatggtgctggctctggaggttcaagtactcctctcactgccgtatatggttcaacaaaatgtggacttaggcagtttcatgggtctatagtgaaagaaagccaaaaaacaaacgttggccttcacactgcatcccctggcatggttctgacagaacttcttctcagtggttcgagcattaaaaacaagcagatgtttaacataatctgtgagcttcctgagacagtagctagaactttggtaccacgaatgcgagttgtgaaaggttcgggaaaagccgtcaattacctaactcctcctcggatattgttagctattgtcacttcctggctaaggagaggccgatggtttgatgaccaaggacgggcgttatatgcagcagaagcagatagactaannaactgggcagagaacaggacgaggttgtcgttaacagacgcgatggagatgtatacagagaatacttggntntctgttttctctnnntctgttgtttgcgctttcatcancnnacaaagcacaacacctagctcttttccaggcacataacaaacatcttcctcggatgtgttttaagaaaattgtaaacgtacatgntatgtataaaaaacatatatataacagaaccgatttgttcatgtaaaaaaaaaaaaaaa

SEQ ID NO: 870 - DNA, 782 bp, Arabidopsis thaliana
  misc_feature (1)...(782): n = A,T,C or G
cttcgaacgtctcacgcatctcttctccgccaccgaatcaggtctcgcttcaacactcttcacctctcgtcctttccaatcattcacagtcttcctcttagaagtctctcgttctccatttccagcaaccatcacttcatcaccatctcccgatttcacaccgtttctcaaaacgcataaccttgatctcccgattgatgatccggagagttacaatttctcgccggatatgttgaacgacgtcgttgtagctgggtttgttctgtttttcccgaattactctagctttttgtccaagcctggtttttacattgaggatatatttgtgagagagccttataggaggaaagggtttggtagcatgttgttgactgctgtggccaaacaagcggtgaagatgggttatggaagagtggaatgggttgttcttgattggaatgttaatgctatcaagttttatgagcagatgggtgctcagattctgcaggagtggagagtttgtagacttactggtgatgctcttgaagcttttgatcaggtcaacatctagagattgatgctgtgttgctgagagttatcgaatcagatcacttcctcttgcttttaaagtttgtgtttnntttccttcttcttgttgttactttatgcaagtgttggcattgatgatgatgatgatgatgaattctctatgcttacttgttggatactgaatgagaaaaaaagaacccttttgttgaatgtatgaaatgtttcgagtttttaaagtaagagttatgtaaaaa

SEQ ID NO: 871 - DNA, 782 bp, Arabidopsis thaliana
taggcagagcagaggaagttgttgctttgcttggtaaggagtttcctgaattgagtttaaagaaggagaactgttcggagatgacttggtttcagtcagctttatggtgggataatcgtgttaaccctactcagattgatcctaaagtgtttctcgatcggaatcttgatagagcgaatttcggaaagaggaaatcggattacgttgcgagtgagattcctagagatgggattgagtctttgttcaagaagatgactgagctggggaaaatcgggcttgtttttaatccgtatggtgggaaaatggcggaggttacggttaacgcgacgccgtttccgcaccgaagcaagctttttaagattcagtactcggtgacttggcaagaaaactctgtcgagatagagaagggtttcttgaatcaggctaacgttctttatagtttcatgaccgggtttgtgagcaagaaccctagaaatgcttacttgaattaccgagatgtcgatataggtgtgaatgatcatggtacgaatagttatgaggaaggagaagtgtatggaaggaagtattttggagataattttgatcgattagtaaaggttaaaacagcggctgatccagataatttcttcaggaatgaacagagtatacctaccgtgcttagcaaggcataggcatggagtttggacatagaccaataatgtttaacgaaggagaatatttactatacgactggaaatattgtttattatattcacggaactctatttatttaataagattct

SEQ ID NO: 872 - DNA, 782 bp, Arabidopsis thaliana
tttttttttagaatagagagttctcgttattaaagtctctcaaaggagttaactggtttagctgctatgctatcaaatttagataccaagagtaggattttgcaatttgcatcctaacttttgatacttacacacttatacagatacatcgagatcgggatagaatctggacttccagtggcgctgaacgggaaggctctgagtccagccacacttctggccgagctaaacacaataggaggaaagcacgggattgggcggattgacatggttgagaaccgtctggttgggatgaaatcacgaggtgtgtatgaaactcctggaggcactatcctctttgcagctgtacaggaactagaatccctcactctagacagagagagtattcaggtaaaagacacattagcactgaaatatgcagagatggtctacgcaggaagatggtttgatccgcttagggagtccatggacgctttcatggagaagataactgagacaaccacgggatctgtgacactgaagctgtacaaaggatctgtgtcggttacagggcgtcagagtcctaacagtctgtatagacaggacatatcttcgtttgaagggagtgagatctacaaccaagcggatgcagccgggtttattcgtctttacgggcttccaatgaaaattagagctatgcttaagaaaattagctagaaatggttttcattcatgtcttacttggaattgagagcctgacattagaacacatcccttattgtgatgcgtcgtcatagcttcag

SEQ ID NO: 873 - DNA, 782 bp, Arabidopsis thaliana
gataatcagatcttgatattatggatcatatcatcggctttatgggcacaacaaacatgtcacataacacaaaccttatgatcgctgccgcagccactaccactacgacctcttcgtcttcctcttcgtcctccggaggctcggggactaaccagctaagcaggtacgagaatcagaagagaagagattggaacactttcggacagtatctacgcaatcaccgtccaccactttctctctcccgttgcagtggtgctcatgttcttgaattcctcaggtacctcgaccaattcggcaagactaaggttcacacacacctatgtccgttcttcggacacccaaacccaccagcaccatgtgcctgtccactccgacaagcgtggggtagtctggacgcactcattggccgtcttagagctgcttttgaagagaacggtggttcaccagagacgaacccttttggtgcacgagccgttcgactctacctaagggaagtacgtgactcgcaggctaaagcacgtgggatcagctatgaaaaaaagaagcgcaagcgacctcctccgccactaccaccggctcagccggcgatttcaagtagccctaattaacattaagtcatgagtaagatgtttcaatgaactacgtttgtttacaaatttttatcaatgacgaacatgcacgagttcttttaaagtcacatgccctttcctaaacttttatttggcaaacctaaagaattcttatgttgtattaaataaatttgtagttctttcaaaaaaaaa

SEQ ID NO: 874 - DNA, 781 bp, Arabidopsis thaliana
ctttttttttttttttttttacagctaatcgttccactattatgatgagtgaccataatggcccagtaaacataagtgattttctgacatagcccatcacgcatttttatgttgagtgattttgttggttgtgaaccgtataaataaatgttgtaaatgaacattatgagaaaacaaaccataatattttgattcaatggcttgtttattcagtagctttgctggcgctgtaagcattgacgagctgagcctggacttcattggacacagcagaatgttctttgtattccatcgtgaattctcctttgccttgtgtcatggaccggagagaagtggagtagccaaacatgttgttcaaaggcacattagcagtgattactgaatcgtcaccctcttgatcgtttccaacgattatacctttcctcttgttgatgtcaccagcaacagtgccctgaaactctgttggtactttcaactcaaccagcataacaggttctagaatcaccggtctagctgctgtgtaacacagtctgaatgcgtatattgcagccattttaaacgcaagttcactggaatctacagcgtgtgaagctccatctgtcaatactattctgagattttctacagggtgaccaattagtgagcccgagtttgcagcttctttgaaacctttctcaattgctggaataaaacccgacggaattgcttgtccaacaatcatgttttcaaactcaaatttctctttagagcctggtggtagcggttccacgtaccctgtaac

SEQ ID NO: 875 - DNA, 781 bp, Arabidopsis thaliana
ggtcgtgaaaattcaaagtgagatctgaaagaagaaaattcctctgatcgctcacgatttctcctgaattctccattagattttgcagagaaaatgatccgattcatattattgcagaacagacaaggtaagactcgtctagccaaatactatgtccctctcgaagaatccgagaaacacaaagtcgaatacgaggttcatagattagtggtgaatcgcgacgccaaattcaccaacttcgttgagtttagaacacacaaggtgatatacaggcgttatgctggattgtttttctctgtgtgcgtggatataaccgacaatgagttggcttacttggagagtatccatttgtttgtggagatattggaccatttcttcagcaatgtttgtgagctagatttggtgtttaatttccacaaggtgtacttgatactcgatgagttcattcttgctggggagctccaagaaacaagcaaaagggcaatcatcgaaaggatgtcagaactcgagaagctacagtgatgacggttaagaatcacattctacttggttaactgcgtacctgccagatgtttcttggcatgttcagagatttgctatactttgttgagttgttagacaatggtgtagcgtttacattgtgaatgaagaatttagagtgattctgctaaagatctctcatccaacattttgtttacctgtgagattttcatttcaactagtgatgtactatttgtttcgtagaactatgataccacacatgctttgagaaaaaaaaaaa

SEQ ID NO: 876 - DNA, 781 bp, Arabidopsis thaliana
ctttttttttttttttttgaataagattactgatattattgaaaaccaaaaacaaacagtacacactacaaacaaagcttacacattactgttgttaacaaaccgaagatgatgatgcctctggaatctaatgtaagagtagtctaaaaacagtaacaaaagtaggaaacaaaacactcttttgcgggattgcgaaattgtataaagagagagaattacgggacgttcattacctggattgattgcagcatgtccgagactgcgatcacgaggtcaccagatttgatcatacctcttgatttcagtaacgagaatgttttgttcaagttgctttccatgtcgtctgagaagctgagacggaatgggataagtccccattgtaggtttaagcgtcttctcactgaggttgtggttgtgaaagcaaagatcgggcagtccgggcgacatcgggagaccagtgatgccatgtgtccgctcgttgtgtaaacgaaaaccgcgtccactccaagattgttagccattttagcagctgagttacagatctcttctgagattttgtctgaaaatgaagagcctatggcttgaagcggcacagactcatgacgtttctcttctctccaccatctctcgattcttaaactgactgtccttagaaccgtgagcgccttgtctgggaattgtcccatagctgattctccagagagcatcaatgcatctgatctttgtcttactgcttcagacacgtcggctacttctgctctggttggagttgggtacctgc

SEQ ID NO: 877 - DNA, 780 bp, Arabidopsis thaliana
tcaaatactaaactttattggttatgttagtatcaaatatcttgagcatacatataaacttcgtataatcaaaactcatcttttacagaattaaccaaagctagtttacatctatataacgtatttgtaaccctattgctttttctttctttacaccaaacttttttttatctaaacaaagtagaatttgtttttgcctcgaccaaaaggtgttttgagacaatggatcataaggcagtaggagcttcggatcctttcatgattctgagtttttgacaagatgaagagaacatgtcccatggaacatcaccgaccaacatccaatctccatctttgtcttcataagtaggtacaaatccagatcctttgtagccttctctctcggaatattcacctactgtgaacttgaacatgttctctagtgctttgagaagctctggatagtttttgtacatcttgagatctatcttacggagatatggagctccgtccatactcactttcacataactcacgtttttgttgttgttgttcttacggttagatctcactggaggccatccaacgatttgtgtttttgcaggaggaggagcagattcttctgttgagtcgttgttcttgcgcttgttgttgcttctgacgcaagaaagttctagttgttgttcttcttgtgctccgggtaatcccaaacgaagctctgtgtccttaaggttaagcccattggtgacttccatattctctcactatactttaacggagaagctctcttccttaattctt

SEQ ID NO: 878 - DNA, 780 bp, Arabidopsis thaliana
  misc_feature (1)...(780): n = A,T,C or G
ctttttttttttttttagagaaacacaggatagctttgtcattagacaaaagggagagagagacagagccggtgtgaattggtatgtacacaaaggaaatggtgaggccttttttacgcaggttccattgttgttcacaggctttagatgaaagaactaatacaacgaacgaggaagaagaagaagacggttatttagaggaggtttcggctgtggctttgcagattgggcaccaactcttcatccgcaaccactcttgcacacacttcacatggtatgtgtgctcacagtgtagcctcccaacttcatctccaatcgtatattcttcctggcagatgctgcatttggcatcttccttgttatcactaggacttttggtgatagacccataactcaaaggtttcatctgatagatacttgttttcaagcactttgatattgcttcttctgtcaaagcagtgcttactgtaccaatcctctcttctagagctaatagtnnntcatatgacatgttatcgatgtctagcctcatgtctcggtgttggtcatggaagcttagtccaccgagaagtaaacctgtttccatgataagcagatcctcataattaagttcgatatcttgttcgatcctatcaagttctggcagaatctcggagatcccatctaaattataactgcgaaaactgtcatgactcaataaggaaccagagaggccaaattctggaaaaccagagaacagctccaaagagacaggagaattgagattgttcggacgcgtgg

SEQ ID NO: 879 - DNA, 780 bp, Arabidopsis thaliana
ccacgcgtccgacaaaaccagagaaaaagacctgtctgtttttttaagaagtctttatatttttttttttgtcggagaatcttataagcatggcttcaggaggatcaaagtcggcagctttcatgcttctgatgctgaatcttggtctctatttcgtcatcaccatcatcgcttcttgggctgttaatcacggcatcgagagaactcgcgagtctgcgtcgacactgtcacttccggcgaagatattcccgatatacttcccggtggggaacatggcgaccggttttttcgtaatattcacgttaatcgccggcgtcgtcggaatggccacatcactcaccggaatcatcaacgttcttcaatgggactctccgaatctccactccgccgcggcttcctctctaatctcctggtctctcactctcctcgccatgggattggcctgcaaggagatcaacataggctggaccgaagccaatctaagaactcttgaagttctgactataattgtgagtgctacccagttgttgtgcaccggagctattcatgctggagtcggagaaacagtcgcctccggagaaaggcctcatcttgggagagtttgagtttcatgattcttcttaaaagcggttttacatttgcttcagatcgtgtaatttgtgtgttgtgtcttgtgtgtgtttattcttttgttttgtttgattattatgatcatgtaaaatgattagttggtgtgaagaaaaaaaagaaaagagattgataataatattacacattaca

SEQ ID NO: 880 - DNA, 780 bp, Arabidopsis thaliana
ttttttttttttttttttttttgaaatgaaatgataactataattatagagaaactgataggaataacattttcactttcaaacaatagttcctcaactgttaagtcggcaaataatttcttaaatttgcattgaccacatagaaatgggttccagaataatcaacgctgaatattccagaaaggggattaagcttcggtgaagcttgggggcttgtaggcaatgaaactgatgcattggacttgacgggtgttgtcgaatccgatgatcctaatgaaggcgccagggtactccttcttgcattcttcaacttccttcaacacttgagcggagtcggtgcatccgaacaatggaagcttccacattgtccagtatcgtccatcatagtatccgggagtgtttccgtgctcacggtacacaaatccgtgctccaactcgaattcaacacaaggaatccacttgttgcggagaaggtagtcaacttccttagccaattcaacgtcactaaggtcagggaggtaagatagagtctcaaacttcttctttccgattggtggccacaccttcatgcagctaactcttcctccgttgcttgtgatggaagtaatgtcgttgttggccttgcgggtgaccgggaaagaagcggatgacttcaagccggtgaatggagcgaccatggtggcttgagccggggaggtaaccacagcggtggaggagagcatagaggaagccattacttcttcttgttgtttctcttcttcttttggttcggacgcgtgg

SEQ ID NO: 881 - DNA, 779 bp, Arabidopsis thaliana
  misc_feature (1)...(779): n = A,T,C or G
actttttcttctctctttattaggtctctctcttcttcttcgtctgggtcctcgctagaccccaaaatcgatctggaggaggctgcggctcagctcgggaagtcttcgtctacgtcaacgtctccatacaaaggcagaaatttccactgggtgtttcttggatgtcctggtgttggtaaaggaacctatgcctctcgtctctcttctctcctcggcgttcctcatattgccactggtgatctcgttcgtgaagagctctcctcctctggcctcctctcctctcagctcaaggagcttgttaaccatggaaaactagttcctgatgaattcataataagtttgttatcaaagcgtctccaagctggcaaagacaagggtgaatctggatacattcttgatggttttccacgcaccgtgactcaagcggaaatactggagggagtaactaatatcgatctggtgattaacctgaagctacgagaagaggcattgcttgcgaaatgtttaggaagaagaatttgcagcgagtgtggtggaaactataacgttgcctgcattgatatcaaaggtgatgatgatactcccagaatgtatatgcctcctcttcttcctccgccaaacnnngaatcgnnnnntataagccgagctgatgacactgaagaagttgtcaaggaaagactcangatttacannnaaatgactcaaccagtggaggaattctacaagaaacgcgggaagctgttggaatttgaattgcccggtggaatcccagagtcatg

SEQ ID NO: 882 - DNA, 777 bp, Arabidopsis thaliana
tttcgttagtcggcgaattctagaaacgatgttcaatttctggggatcaaaagaccaacaacaagggcaatctcgtcctcaggaagcttcttcacagtcgccatggtactcgccttctttagttagctcgccaagctcatcccggcctcaaagttcaggtcagatttcagcacaagtatcaccgggtgaagcagctggcattatcgtcttcttgaaagacaaaagcgtggatgaactcaggaagcttctctctgacaaagatgcgtatcagcaatttctgctctctcttgaccaggtcaaagtccagaataatatcaaagatgagctccgtagagaaacattgcagctagctagagacaacttggagaaggagccacagataatggagctcagaaaccaatgcagaattatccgtacaactgagctcgcaactgcgcaagaaaagcttaatgagcttgagaggcaaaaagaagagatcctcaaattctactcccctggttctcttcttcataaacttcaagaggctatgaatcaggtggatgaagaatccgaagccctgcaagaaaagttcctagagaaggagattgatacagcagcatttgtgcagaaatacaagaagcttcgtactacctatcatcgacgagcattgatccatcttgccgctaaaacgtcaaacatttgagattaaaaagctttacacattgaattcgagactttggttgtgtattatgactcttacccattgttgtaaaaaaaatgctttgctgtttaaaaaaa

SEQ ID NO: 883 - DNA, 777 bp, Arabidopsis thaliana
ctttttttttttttttaaacaataaataacacacattttccatggaatcgcacctacacacatatacttccaaatgtctttgatttgaggatgaagccaaaaaaacaaaacacaagtatttcaaactatgtatatatatacctttctttcttcaaccccaagcattatcaaacgcagctgaagtaatcgcttgaacaaactcttggaaatcaatacaaccatcgccgtctcgatcagcttctttgatcattcccgttaactcctccgccgtcaacgcgtgacctagcttcgccatcgaatgggctaactccgccgccgttatgtaaccgtttccatcgcggtcaaacattctaaagatggctttaagctgatcatccgtgtaaggacacttgaccagatctggctcgacgagggcgacgaactcggagaactcgaccagtccgttgttattccgatctgctttctggatcaatgtgtcgagttggtcttgactcggctttagaccgagagatcttagaagtgagcctaactcgagctccgtcaaacttccatccttgttctggtcaaatgatcggaatatctcccggagctccgctagttgttcgtcgcctagtttcgccggcgccggtttgcctccgtcgcagctcatctcgaatctgattttgaatactgtcaagcttcgatttcgatgaacaacatttttctttttagagttgatttgtttcttcttgacaagtcaacgatgacaggtaatggattacaaattcggacgcgtgg

SEQ ID NO: 884 - DNA, 777 bp, Arabidopsis thaliana
tttttttttttttttttttttttttttttttttttttagggaagaaacatcatttgtttaataagagtgataaaacatttgtgaacagacattgttatcgttatgaaaattattaagcaatttattcagaggcttgaccactgattcggaaacaactctagccaaaaaagcaacaagcacacaatatgtaaaaactggaagttactccttcaactgcggatcgctgggtgtagcagctgggatctctgttttagactctgcaattagaccttcaagcgttttatagaactgctcaggaagaggaccaggtcggtgctgaggaacatgctttggaatcggcgcatcattctcaatcacttcacactcgtaatcatctggtacaccccaaggatcccactcaatcattttcccaatgagtgtgagctcatcgcgagcctcttcgataagctcttcgacttgaccacaaccaagccgcttctcaatcatctcccaatcttcttcttccttgcacacattgagacgttggcgcgtgaatgattccaccgctttacggtacccttcatcctccggcacagcttggatctcctttagggttttgctgtagagatcgatcagcaccgctctcgcgttgggaacaacgtcaagcccgacgatccccgtcgtctgcttcactttagccaataatggccgtccgattgcccgtagaaacatctcaaccgttggatcgctctctccctctccttgactccggcgcaatctcagaaatgttgtttgtcg

SEQ ID NO: 885 - DNA, 777 bp, Arabidopsis thaliana
ctttttttttttttttttcatcaacaaagtaatcaaccaattcaattcttcaatacatataaaccaaaccctgaaacacagatcaaactaacatttgatacaacctctcttctcttaaacaaaatcattacaagaagtgaatttttcttcaaacttggaacgcccatggggaatttttgagagtctcttcactctgaaccttaccagtccttttcatagcaactccattgttatcaccatcgacataagcgtagtacttcaagaaaaaggcgagaacaagaacgatccactcaaggcaaaagattacaacacagagcccaccagctagtttcaagatcatagacgcttctttctcacggacgtaagagttaaggctctcgaggaaattcgaagtgttggtaaagatgagaacagagactgagccttggaaaatggcggtaaggacagttgcgatcatgtgagctgcgtaccaccggttcttaccataagatgcggctgcacagcctgagacggcggctgcgatcgtggtggcgtgaaggaggatgaggaagaaaccgcagagtgaagggattagacggagagagagagtgaggaagatgcagcttgacgatgcaccgaggaggacgtagtttgcagtgaggaagagtttatgtgtgtagtaatgagattcttggatcgattcttgtggttgaggaattaaacccatgacgatgttggaggtttctgattcgggttgcagaaaattttggattttgagattgcgaagaagaaaggaag

SEQ ID NO: 886 - DNA, 777 bp, Arabidopsis thaliana
tttttttttttttttttttttttttttaacatctcataagaaactttgaatgtttcaacacaaacttttccaacaatccaaaaccaatagatatggttgtcttgcaacaagaaacacacacaaagggtctaaattaggaaaaagaaaaacatcttttggttcttataacattgacgtccgttgtcaaactggtaataatatatcgaatgatacttgtttacttgccaccaccaacttccttgacggcacagatctgctcctctcccatggaagacatgacagacaccacaatatcctttccctcatcgaatccaagcctcatctgggcggtgagaccatcatcggtgggaagcttgagatcatccttggtgccaccactgtcagtgagaaggctcacgaagccatcctcagtgatatcaatcaactggtaatcaacacggttcacatgtggaacatcacaattgtgggaagatggaacaatatcttcaagcttcttagcagtgaagatatcaatagcaacaaagtgacatttggcgtgaccgtgcttgccagttttggaagtcgaaacctcaacaaccttgcagggacggtttttgatgacgatgtgaccacctttacggatgttaccggctgattgaggataggtcttggaagctccggattcgctggcctcaaagtggtgctcgtcgtcagacatgttttcacagaaatttgagagaagaaaggttttcggagaagatgagattgggagaagggaaaaaaaacccggacgcgtgg

SEQ ID NO: 887 - DNA, 776 bp, Arabidopsis thaliana
  misc_feature (1)...(776): n = A,T,C or G
gagaagaggaagcttgtagaaatcgatggcgacgatagtgcagtgtctttcttcctgtgcgaccctcgaatcccaattcaaagtcctttcgcttaagggaatctcttgttcgtcaccatcttcttccttctccaatcgtcgtggtgcttcggctaccttatcctcttcccttagcttctctcagagcgtttctcaatgcgtcgccttctcaaccgggaatttgtgggtacagaagccaatgaggcaattgattgtgtgtgaggctgctgctcctaccaagaaagctgattcagctgcaaagagagctcgccaagctgagaagaggcgtgtttacaacaaatctaagaaatctgaagcccgtacccggatgaagaaggtcttggaagcacttgaggggctcaagaagaaaactgatgcgcaagctgatgagattgtgacggtggagaaactgataggagaggcttattctgcaattgacaaagcagtgaaggttaaagcactacacaagaacactggtgcccgtaggaagtctcgattggctaggaggaaaaaagccgttgaaattcaccatggttggtacgtcccagacgcagctgctgcagcaccatcagnnnntnnncccatggctgcataagaacatggggataacggaaatttgtttttgttactagatctttcaaaatcaaaatctgtttctttataatgtacatttagtcgctttcagactcttcgcttgttaagttcgatctaagcattttgtcttctaaaaaaaaaaa

SEQ ID NO: 888 - DNA, 776 bp, Arabidopsis thaliana
gcggccgctatcttcttctctcataactcagtttactcagattcactgaaacatacaattaagttaaccgtcagtctctcacctgcagcaaaattcactcttctgctaataatgttctccacagagattcatctattgatcattttgactttttcaggaaccagagatgaaaaattatagttaagaaaccagagagaccctcttaacgacaacaacctctctgtacacaagacaacaaacactctctacaaaaacactactctttccttcttcttctctctactctattctaattctaaagagagagagaaaagctatggatggatatgaagctactaggattgtgctctctagaatccaaagcttagaccctgaaaacgcatcaaagatcatgggtcttctccttcttcaagatcacggtgagaaagagatgataaggctagcttttggtccagagactcttgttcactctgttatagtaaaagccaagaaagagttaggtctcatgaactgttcaaggtctccgtggagtcatcaagatgagttgattagccctaagaacaaccgtggctcttcactcaatccagcttctttgcccttttacgctaatggaggaagatcttctagggatttaaccaacgatttcgagctcatggatgatatgaactccagaagtactgattttttgggctctgtgcatgcgagaagcggtagctgcgttttggacggtttagggtatggtggtgattctgatttagggtttggaggtgtgccct

SEQ ID NO: 889 - DNA, 776 bp, Arabidopsis thaliana
  misc_feature (1)...(776): n = A,T,C or G
tcgagcggccgcccgggcaggttttgaatcgtatctcctctcatttcttcttttgttttgttggagttagataaaatcaaaggtctaataaaagtgtcaaaacccttatcgctataacctccactaccatcttaaacttctccttataactcacgcttctctgctttcttctctcaaagtctaactgctcaaataagaaaatggttcatgtgtcatcatctcatggagccaaagatggctctgaagaagcctttgattacagaggaaacccaccagataagtctaaaaccggtggatggttaggcgccggtttaattttagggagcgagctatcagagagaatatgcgtgatgggcatatcaatgaatctagtgacgtaccttgttggagatttacacatctcatcagctaaatcagcgaccatagtcaccaacttcatgggaactcttaaccttctagggcttctcggtggttttttggctgacgctaaactcggtcgctacaagatggttgcaatctcagcttctgtcacagctctgggagtgttgcttttgacggtggctacaactatctcaagcatgagaccaccaatatgtgacgatttcaggagacttcatcatcagtgcatagaagcaaacggacaccagttggctcttctctatgttgctctctataccatagctctaggcggaggaggaatcaaannnaacgtctcnnnnnttgggtctgaccagttcgatactagtgatcctaaagaagagaaacagatgattttc

SEQ ID NO: 890 - DNA, 775 bp, Arabidopsis thaliana
  misc_feature (1)...(775): n = A,T,C or G
ttttttttcttgtacccaaaattgcatatatatatttttcttcaagaaaaacaaaactaataaacatgaaaatnnaacaaagaaaggacaaaccctttaaaaaagagaggtttcttcgctttttttttttctttttccctaaccattttttttttggtttagtattcaaattcaaactaaagaaagatctttagatgaagaaaaaacccataaatccattaactagcttttacagcaatatgagcgttaatggattctctatctccctttttttcctttataactttaaattaggcagcagcaacagttccagtgcggaaagcatagttacgagatctagttggagaagaagaagagcttcgcttttcatttcttctcatagctttcacagatgtagacagactctgtttcttctcttttgcttcgtctctttctatctgttcttctctacactcttcactacagaacggtgtgtctcctctgtacatgaagatgtctctgttatcaccaagacgtttcttgcagaggaagcaagagtccaagaaatgnnnntgtccataaccgtaatagctattgtcgaatctaaaatcatgannttttccagatctgggagatgaaacagagtactgatgatgatgatggttntaataataactctgaggatagttgtaacaagaaggacttgaaactccagcttccatctcagataaagaaacaaaaccatcgtcttcttcttctatgaaataaggctttctcatcgaaacctccatttttt

SEQ ID NO: 891 - DNA, 775 bp, Arabidopsis thaliana
  misc_feature (1)...(775): n = A,T,C or G
ttggctctctcatggctcaaggtttgatctcattgaacaatcagcctgctggtcagggaccattggggttggagtttgatgcagacatgctcaagatacgtaatgagtctgcaatcagtgctttatatggggatctcccgaggcaatgcacaacctgtggtctacgcttcaagtgccaagaagagcacagtaagcacatggattggcatgtaaccaagaacaggatgtccaagaaccataagcagaacccttctcggaaatggtttgtaagtgctagcatgtggctcagtggtgcagaagcacttggagctgaagcagtaccagggttcttgcccacggagccaacaacagaaaagaaggatgacgaagatatggcagttcctgcagatgaagaccaaacttcatgtgcattatgtggtgagccatttgaagacttttatagtgatgaaaccgaggaatggatgtacaaaggtgcggtatacatgaatgctcctgaagaatcaacaacagatatggacaagtctcagttaggtcctatagtgcatgcaaagtgcaggccagagtccaatgggggtgatatggaagagggtagtcagaggaaaaagatgcggagttagatcccttagaccgaattttaggtctttttcttgactacatttaagttacattcttatttcttcatcatctatatgcacttagtcacagaataccancaatgannagaaatgatggagagagtcttctttctcctaaaactgtaccattgaaaaaaaga

SEQ ID NO: 892 - DNA, 775 bp, Arabidopsis thaliana
ccacgcgtccgtatctttcaagatcttgttgattggagattctggtgttggtaaaagcagcttgcttctcagcttcatttccagctctgtcgaagatcttgctcccaccattggtgttgactttaagatcaaacagatgaaagtaagagggaaaaggctgaaacttacaatctgggacacagctggacaagaaaagttcagaacattgacaagttcttatttcagaggctcccaaggaatcattctcgtttatgatgtcacgaaaagagagacatttttgaacttggcagatatttgggctaaagagattgagctatattcgactaaccatgactgcattaagatgctcgttggcaacaaagttgatagagaatcagaaaggaaggttagccgggaagaaggaatggctctagcgaaagacctcaattgtttgtttcatgaatgtagcgcaagaacccgagaaaacgtgaacggatgcttcgaagagctagctttgaagataatggaggtacctagtcttttggaagaaggatcaagctctgtgaagagaaaaccggattaccgagctcatcaaggccggtgttgcagctcgtgagtcaccttgttaaaatcgggtcggaagtagcctcttttgtgtgtaaatttctcaagaagcttgacttctctgtaaatttatcaattccttcgatctttcttcttcttgcctcggcggagattttgtaataagtttgtaaccccagaatatatgaaaaaaaggcacttcatgttctaaaaa

SEQ ID NO: 893 - DNA, 775 bp, Arabidopsis thaliana
ccacgcgtccgcttcttcttcttcttcttcttcttcttcttcttcttcttctttttctttagaaacaacacaaaccccaaaaacttaaaaaataactctacagagatggctgttggaatccttgaggttagtctgatcagtggcaaaggtctcaagcgctctgattttcttggtaagatagatccatatgttgagatccaatacaaagggcaaacccgcaaaagcagcgttgctaaagaagatggaggtagaaatccgacatggaatgataaattgaaatggagagcagagtttcctggctccggcgccgactacaaactcatcgtcaaagtcatggatcatgatactttctcctctgacgatttcattggcgaagccacggtacatgtgaaagagctattggaaatgggagtggagaagggaacggcggagctaaggccaaccaagtacaacattgttgactccgatctctcctttgtcggcgagcttctcattggagtttcttactctcttttgcaagacaggggaatggatggagaacagtttggaggatggaagcatagccaagttgattagtttggtttcttaaaactgctgattttatcttcttcttctatctttagtgtcaacatcattaagatattcataagtacaaaaaattatttaaattaaaatgtatcatgatttgttggttgtggggaatcttcttgatttagtaagagcatgtgtatgaaattgaaatctcattgtatttataatttatattttacataaa

SEQ ID NO: 894 - DNA, 775 bp, Arabidopsis thaliana
  misc_feature (1)...(775): n = A,T,C or G
ctttttttttttttttttttagaataagatatttacgactacaaataaaaggtattacaaattaattaagctttaaaggatctgcattacaatacaaataacatcatcatattccaattcatccaacattaataaaaataacttaaatattcaaagaaacaaaagaacatgaattttaaaaggttataaaatttattatagtaaaaaaataaatgactggcgcttacactgcacaaatgaattacgaaatgaagggaacacataagagacaacaatctcggacacattcataagtgggaaaataattatattaaataaaatacctcagctgcctgctccgttggtcacggtaacgccgccactctccaccttagggggagctgagaaccgccgtggtttaggcaatgcaggcgaagttggatacgagagccgtttcttagctgatgccttgtctgtgaacccttcgttttcctgtgtggtaccacctaatgggctttggggcttgagcctggctcgagctgatttagttggaaccatgtagctcgggagagctggtgagccagcgaggctctcatcgtctctgactgatgaaccagcaatgctgtgtctgcggttcctctcggacaggaccgagattgtgcttttggagtcgtcgtcattggatttcctcgaggattggtttagccttgagggagttggaggtgagangnnactgtttttgtttcttggggtccctcttgcggatgatggtgtgtttggttgagttgagccattg

SEQ ID NO: 895 - DNA, 774 bp, Arabidopsis thaliana
  misc_feature (1)...(774): n = A,T,C or G
tgggcaggtgttgttatctctgtgatcttagctatcatcaccggagctcttactctgtcttcttcattcggtggtgagcctgatgaagcannggagaattacgctagaggctcatgggctgctctgttcgctggaatctgtttcgctcttcttctctgnnacatccaaaacgtcttcgacagttacatcttcaaacgaactgaatcaaccaatcaaaaaccaanctttgcctctgttttcgaagttattatcttctcttctctcgttgctacgatcatctccgtcgtgggtctgcttatagccggtgagcaacacgatttgaagagggaaatgaatggattctcgaaagggaaaggttcttatgtgatggctatggttggtcaagctgtttcgtggcaggtctattgggttgggattgttggacttgtctactctgtttcgagcgtgttgtcgaatgtgatcagtgtcattacgtggccgattgtgtcgnnncttgtggtgatcttcttcaatttcatggatgatgagtttgatgccttcaaaggtgttgccttggttactgccgtcttaagcgctgcagcttatttctttaggcttcacaaanncaatcgtatggcttattaggtttggattcttgaatctctaaagaaagtttttttatttcccttgattttttgtgtgtatatctaatcatatattctaggtgtttatcttgtgtaagtgtaagtgtgtaacagctttggttatagatgtaaatttgtatgttttacaatg

SEQ ID NO: 896 - DNA, 774 bp, Arabidopsis thaliana
tttttttttttttttaaagcatcccaaatgaaaacatttgcattcaatacaatggctttagttacatacaagattcaatgaagcagattcgttagtgaatcctattgttcaacaagcacacttgatcttctttacacagcctcaaaatctaaacccttaatgcacatctgattttacatcaccaacaccaatgttcgttctatcacatgatagataccttatatgggtcgtaaaaataggcatgtgtatacatgtatttatgtatctatatacagagagagatccacttcaccaatctttgttaagtccttgtcctaccggaggcagctccacctccactgtcgctaccgccacctgtggctccatacatatggttctgctggtgaagaaactgatgatgttggtgatactgcatcccaccaccaccaccgtagaacccaccgccatctccgacagcatctctctgatgctctccgacctcaccaccagtctgtggcctccctagtccagtcctctccccttcgatctccctaaacctctgcaagtaaactttcaatggctcaacataatcctcaaaacctagagtagtcatagcccagagcaaatcgtctccgttgatcgtcttcctcttctccttctgacacttatcagatgcttctccggtgacgaagctgatgaactcggagacacactcctgcatcgtctctttggcatctttagagatcttggcgttggcgggcaaggccttcttcatgatccggctgacgttagcga

SEQ ID NO: 897 - DNA, 774 bp, Arabidopsis thaliana
  misc_feature (1)...(774): n = A,T,C or G
ctttttttttttttttttttttttttttttttttttttttttttttttttttttttttaaagaaaaagaaatctttgtatttgatcacacaaaatgccaaacaacgttttaagactgaagcaacagaagagcttgaagcaacgaaatacacacaagagcttcaagaccccaataaaacaaactcactgcattacttccgactcacacgatcaggtcaaaaaacaagcaagattcgtttaagaataatcagatcacaagttctcgagaccagtataaaacaatttatgtgctttgtgttttgctgccagatgactgactatagctcagtgtcacaaagacggatcattatttcagagaccattctccgtgcgaatggaatataactgaggctgtaccatatcagtgcacaaatctcacataagatcgcaaggaccgttaagattttgctatggatcaggagagcgcaaatgagtgcaacaacgacacatccgatataaatggatgtagctaagaaacgaacagggtcaaacatcatactcatctgttgctcaggtcccatgaggaaagcttccaatagctagaacatttccaaatgtgaagagcagtgcaaatttgatggggatcccaaatacaatcatagacaggaacataagtagcagaccagtggctaaagacgcggcgaatccgtacattctctgggtggtggagagagcnnagagaccctccgatccatcttcaaggaaactatcggttgttccgtcgccgtctcctcca

SEQ ID NO: 898 - DNA, 774 bp, Arabidopsis thaliana
aatcgtcgcagtctcggtcgtaacattctatgccgttagctttgccgagatcagagagaaatcgtttaaagatgtgtacgactcggagaacgaagttgggttcaagacttctctaagttcaagggagagaagatcaaagagagaagcaaacaaaaaacgtcctaaatcttgattccaaaaatcaccatgatccatgatcgttttgcttttcaatgttcgtacaaataaacaattcaaaagagtttggttattgttaactatggctgcatttttggtttagtagatgatcttgatcacatcgtcagatgttgtcccattattgtttattcctcattaaaatgtacttatttaaagacttgttgtgtgttaaaaaaaaaaacaaaggatccaaactttgagaatctaaaaaacatttttcatcaacatcattttgactctgcttttcacttcttgtgctgagccttgagttcttttaccttctcttccgttgccttcaatgctttcccatagatagaaatcaactcatcaatctcttcaggtgagataatgagcggtggagacatcaaaatgccatcacctgcaacacggactaacatcccgtgcttctggcactcggctccaaagaatgcgccaacaccccattctggtggaaatggttcgttcggagatttattgtctacaaactcagtcccaagaatcaaacctgttcctcttgtctctccaataataggactaccagaggcaaacgctttaactccatcttgaaaccttggg

SEQ ID NO: 899 - DNA, 774 bp, Arabidopsis thaliana
gaacaatctctctctttctcgttcataaatctccaaaaccactcgagcaagaagagaaccgagtcgggcaatcgcaaatttagtttctttgttcactgaagcttcaaagtgttttgagtaattggaattgaaggaaagatgagcaatggtggtttgagcattgatgagaaagaagggttgatagacaaagatgaagtcatgatccgtcgaatgaagaacagagaaagacaacgtaggtatcgagccaggaaacggatgcgggaagaagaagcgggtaacgatgataatctttcgtttgagacaatgggaaaacaagaagaagaagaagaagaagacgagggactagagtttaatggacctagtggttatgttgagaactttgtgcggcgggtttattgcgatagaaattggaaaaaagaagctagaagagctcatttgattatgaacaaggctcaagatagttcttgtgagtcggttaaacggaagataaggccgcatcgtcgagattggaaagctgaagctagaaagaagaaaacttgattcttgaggattggtcaggttgctagaggatcttgcgaggtgatcgaggaagagaatgcacaaacaaagcagatttcagattcaataatctcttcaagatttctatttttgtagatattggaaatgatcaagacaaaagcaagtgatttgctttttcttgtctgtgactctgtctgtgtattcgaagatccatgtagtattatactaaggtttatgtgaaaaaaaaaaaaaaaa

SEQ ID NO: 900 - DNA, 774 bp, Arabidopsis thaliana
cttttttttttttttttttttcactggaaagattatgtttattaatgatccacagaatacagcccaacaaaggtccacttagttacatttctttaaaggaaggatatctctttaacaaaacacgatcgtataacaagacacgtgttgcaagagaagcgatgaaacgttcctgtcatcctgtgccgtcaaagactccgatccgctgaacacaatcaacgtcgaaaaagggcaaacatcgatttttgtttttttctcaccggaaactgctaaacagagaagggaggatacacaaacagagaattcaattccaaaatcatcaatcaagagatttggcaaaaacaggtaatgaggaaagaaaaatctgagtattcctcaaatttgatcgatcgaagctccataaacatgtagaaacggctacaggcaatcccaatatgctggaaacaaaacttcctttcatacttgaggtaattctgcaaatcaaactttctaaagatacaaatccgaaaacttaatcttaggctattatgacctaaaattaatctccaattgaaatctttagaaattattgaaagaaaaactgaaaaagaaactaaagcaatcggtaagaacaaccgatcgaacggcggaggaaggataaaagccggccaaaaccgcttgtaaaagccggatttgccagaagaggaccggccatctttgctaacaaagccaaaattaatctccttcatatcttttagagagaggaactgttgaattctgtcgaccggattattctgg

SEQ ID NO: 901 - DNA, 774 bp, Arabidopsis thaliana
ctttttgtatttcctcaacaaatttctcatctgctctcttcatattgtgtctttgaacgcttcatctcctcgtcatggtggccacctctgctacgtcgtcattctttcctgtaccatcttcttcacttgatcctaatggaaaaggcaataagattgggtctacgaatcttgctggactcaattctgcacctaactctggtaggatgaaggttaaaccaaacgctcaggctccacctaagattaatgggaaaaaggttggtttgcctggttctgtagatattgtaaggactgataccgagacctcatcacaccctgcgccgagaactttcatcaaccagttacctgactggagcatgcttcttgctgctataactacgattttcttagcggctgagaaacagtggatgatgcttgattggaaacctaggcgttctgacatgctggtggatccttttggtatagggagaattgttcaggatggccttgtgttccgtcagaatttttctattaggtcatatgaaataggtgctgatcgctctgcatctatagaaaccgtcatgaatcatctgcaggaaacggcgcttaatcatgttaagactgctggattgcttggagatgggtttggctctacacctgagatgtttaagaagaacttgatatgggttgtcactcgtatgcaggttgtggttgataaatatcctacttggggagatgttgttgaagtagacacctgggtcagtcagtctggaaagaatggtatgcgtcgtgattggc

SEQ ID NO: 902 - DNA, 774 bp, Arabidopsis thaliana
tttttttttttttttttttttttagttccaaagagactttattataatgctaaacaagtttgggggtacaaaacattacactttcgagggtgatgatacgctataacaaagatcaaaaagagagctcagaagactaataaactgtcttttaaatagaaaagaaatacaaaaatgaaagaacaaaacaagacttaatagatagatattattatacctctatttacttcatcacaccttttttatttcgacaaaattaaaagagaaactctctatggaagagaggctcatgagataccaatgcatagagcttgaggtgtgacttgtaccatcccccaacagcaaaatccaacacagctttatttacaaactaaggaaccatcgatcacttcaaaagtctccttccagcatgaaattgatctcatctaagctccatagctccactgggttttcctcttcctgagtcacagcaccagcatctgcgccaagcatggcttccacttctagtggggtgtcccacaaggcgttgtcaaggtatgccatcagatcgtctgactcatcagagtttggtttgagcttcttggctgcattggtttcttcaacaaatgatgcttcgttgttattgacaagcattgaagagatctcgggtgttttagggccgtgatcactccacccgaactcagaacagtcgaaggagttactgccctgatcggaactgaaatactggtatccattgttacctccagcatcgaacgagtttgttaacccaaactgatt

SEQ ID NO: 903 - DNA, 773 bp, Arabidopsis thaliana
  misc_feature (1)...(773): n = A,T,C or G
ttttttttttgtaatcaaaatcgtgaccttttgatatatagtgatatgataatcaatggattgtttttttctcttctggaaattaaacaaaaattnnnaaaatagaggtttgcgagagactaatacaatactgacgcagtctggaaaaattaaaagcagctaaacttttttccggagatttcgtgacttcttcttcatcttgttgtgtctctagtaacgaccaataccccagaccctgacaactccatcagtgtaaccactgaacaatgtgcttccatctgcactccagttcaagcttgtgcagtagataaccttcttctggttaccagttccaacaccaccttcattcttctctgcctcagacttgagatcaaccttcaagtcctcaacaacagacttgctctcaagatcccaaatcctaatgctattctcagtagcagcacacaaccagtatctgttaggactgaagcaaagcgagtgaataatcgaacccgcctcaagcgagtaaagcttctttccttcagccaaatcccacaacaagataacaccatctttcccaccactggcgcatagcgaaccatcaggcgagacagcaacagtgttgaggtaaccagagtgaccaacaagagagttcctcagcttacagttctggagattccaaactttcacagttttatcccaagaagcagatacaatagttggtacaagagtattaggactaaacctaacacaactaacccattccttgtgaccatcaccttccggacgcgtgg

SEQ ID NO: 904 - DNA, 773 bp, Arabidopsis thaliana
tttcaaaatgtcacttagtacacatgtataaaacacacagtaggcctaacacagattactttacagagaaattacatgggcaaaatcgtattaaaacatcctccccataacgtgctctcttttccttagacgagtgtcccacctttgacgaactcagtgaacgccaacgcgaccaaaccgagcatcgcgaaacgtccgttccaaagctcagcgtctgacgtcatgatacctttggacttggactcaacgcttatgcccttgaaaagcggcacaagcgacgcaagtgtcaagatcgctgttgtaccgaggaaccatgagacgccaccgtcggagatctgagctaaaacgttttcacccttggatagctcgacagccaacgccgcaacgaatccaaccatcgctaaacgtccgttaatcctctctggtgctggaccgctaaacgctagcaagtcgctaaactttgtgctcaccttaggtttcataggaggaggaggagatggtgacttcggcaacggctgagcggccgaggtagatggtgctggtgaagagtcttcattcgtgggtcctccctcagccatgcatctcactcccaccggataattcctcttgaggttagggaagctaccggcggagaaaagcttgttggtgttgatcttgcgagtggttaatccaccggcgaagactgattgcatgttgaacgatgctgttgccatttctaaagcttagaactacttgtgtgagagaaattaagaagaaacttggagtagctaagt

SEQ ID NO: 905 - DNA, 773 bp, Arabidopsis thaliana
ccacgcgtccggtggcattgaagaaggtgaagatggaaaaagaaagagaaggttttccattgacttctcttagggaaattaacatcctcctttcttttcatcatccatcaatagtggatgttaaagaggtggtcgtgggtagcagccttgatagcatattcatggtgatggaatacatggaacatgatcttaaagcattgatggagacaatgaagcagcgttttagtcaaagtgaagttaagtgcttaatgcttcaacttttagagggcgtcaagtatcttcacgacaactgggtgcttcatcgagatttgaaaacatctaacctgcttttaaacaatcggggtgagttgaagatatgtgactttggtttggctcggcaatatggcagcccgctcaagccttatactcatctggttgttacgctttggtacagggcacctgaacttctcttgggagcaaaacaatattctacagccattgacatgtggtcactgggctgtatcatggcagaactattaatgaaggcgccattgttcaatgggaaaacggagtttgatcaacttgacaagattttcagaatccttggtactcccaatgaatctatttggcctgggttctctaaactacctggagtcaaggtcaactttgtcaagcatcagtataacctattacgtaagaaattcccagccacttcgttcactggtgcaccagttctgtccgatgctgggtttgacttactgaacaagctcctaacgtacgatcctgaaaggaga

SEQ ID NO: 906 - DNA, 773 bp, Arabidopsis thaliana
tttcagcttcgatcttggccacgattgcatcaatttcagcttcttctagctggcgcagccagtttcctcccgtgtcattacggcaacctcaatgttctttccgccactctcaactacctcaagcagagcacggatagcgagtttaatagtttcttggccagaggattctttgtagttcttctcgaggaattccctaatagagttggagtttctgccggtagcattagctttccaagcagagaaagtcccagaaggatcagtctgatatagggaagggaggcgagagtaagggtcaaagccaacgataagagtagaaagaccgaagggtctgacaccaccactttgggtatacttctgttgaaggccagcaatgtagcgagtgatgtactcaacagtgacagggtcctcaagtgtaagcctgtggctttgacactcgatccttgctttgttaatcaagactcgggcatcagccttgagccccgcgcatgccaaggcaatgtgattgtcaaggctcacaatttttctggctgatctagaatcatgaagcttgggggtggacttcttctcgacggcgaggacaacggtgtcggtaccgcggacaccgacggcggcgttacccttgcggacggcttcaagggcgtattcgacttgaaagaggtgaccgtcgggggagaagacagtaattgctcgatcgtatctagccatctctctctccgctttttattttcgttttcgttttcagggcaaattataaaaagacgaatcccaacttg

SEQ ID NO: 907 - DNA, 773 bp, Arabidopsis thaliana
ttttttttttttttttttttttttgtgtaatagcggattctgacacatttggtctcacaaacagttaatgagctataatgtctccaaaaaccacaatcgtagcaaagcaaactgaagaagaagatacagcaaacaacaagtgtgaatagtacaagagaagagagacatgcaacgaaaattataaccaaaaacgaggttctacatattaaagacatcccatcttaaaagaagctttaaaccttgcggacttggatgttatgtgtcgattgagatcgccagattggctgtgtaccgctctgtacgattgctatttcctctcccttcttcaccattccttgtttcagtaatgtagccaaagcattagcaaaagtttcttctgcatcatctgtgaactccatatatatggggcatacaccttgatacaaagctaatctttgttgtatttttttctcatttgtgaaggcatagattgtgccggaaggacgatagtgacttaacaatatggccatgaaaccggttctggtgaagacaacagttgaagttccaagtgtgtttgacatcatggttgcatggtatgcaaacatctcactcatatggttcttgaaggcttgaccaagattaggtggcatttcaccgctagtaatggttgcttctgttcgcaatgcaacagtgtgcatcactccagcagctttcaatgggaactttccgtgagcagtttctcctgaaagcattaccgcatcagcaccttctctaacagcgatagcaatgtctga

SEQ ID NO: 908 - DNA, 772 bp, Arabidopsis thaliana
  misc_feature (1)...(772): n = A,T,C or G
aaaagggggaaaggagaaaagggtcaacaaatatctccctcctgaccccaaaacacttggaaagagtaaagagaaacctataaaatatcgaatctgtttcactttgaagccttgtgagctggtggtttggattggttcgaagtagctgcagttgacataacacgtaaccgaccagctatctccgtgaaggatggccttgctgttgggttaggcgcccaacactcctccattaatattcgccagtccgagtcacagtagctcggtatggtcggcctcagtgtgttgttcactatcccacctattatagcaccgtagtgcatattagcatatggttcctcgccggttagaatctcccacaagactataccaaaagagaagacatcgaccttctctgaaactttgctgctgctaccattgagaagctctggtgccatccatggtaaggttccgcgtacaccaccagataccaatgtatttcttttgattttcgacaaaccgaaatcaccaaccttgcagattgggcgagaaggatctttgaggttcacaagtaaattgtcacatttcaaatcnaagtgaacaatgtttttggcgtgcaagtattccattccaaaggcagcatccatggcaatgattagtctcttacgacgatccaggtgtctatctttcctgactagaacatgtctcagagaaccatcaaccatgtactctgttacagtagccaatgttgcaccaggtccatcttttacaacaccataaaatgcaaccacatttg

SEQ ID NO: 909 - DNA, 772 bp, Arabidopsis thaliana
  misc_feature (1)...(772): n = A,T,C or G
atggccgggtgatgaaggtgaacagagatgggagcaagcttgggcagccattaaaaaggtctgggcttcgaaatggaacgagagagcatacttcagcacgaggaaagtaaaactggatcatgactatctctgcatggctgttttggtccaagaagtcatcaatgcggattacgcattcgtcattcacacaactaatccatcttctggagattcatcagagatttatgccgaggtggtcaaaggccttggggaaactcttgtaggagcatatcccggtcggtctctgagtttcatctgcaagaaaaacaaccttgattcgcctctggtgttgggctacccaagcaaaccgattgggctgttcataagacgttcaatcatcttcagatctgattccaatggagaagatcttgaaggttatgcaggtgcaggcctctacgacagtgtaccaatggacgaggaagaccaagtcgtgctcgattacacaacagatcctctgatcactgacttgagcttccagaaaaaggttctctcagacattgcacgcgctggagatgccattgagaaactctatggaactgcacaggacattgaaggtgtgatcagagacgggaagctctatgtcgtccagacacgaccacaagtgtgatcaaattctctgaccacttcttaatgtgtacgttacgttttctgtccagtaaannncttatttgctctataagcaaagagtataatacagcataagcatatagtggattacaaaatgtgtagtaca

SEQ ID NO: 910 - DNA, 772 bp, Arabidopsis thaliana
acacgacttcaagctccaacctttacctccatcgctgccgtaaaaaccatcctcttccatctccgtcgttcttttcaccgttccggtcgtctccacttccttctcagacccttttcctcgtccccactccaaaacctgtacgacgcatcgcggtcgctcctctcggccctccaacgccgcctagtcccgacccacctccgcctaaaaacacgactgagctcacaagtcttgtgggagtagcgtcgatgattcaagaccgtgtaaagatctttctttcagtactaatttggatctctctcttcttttgggcttcggctttacaaggaagaggcagcaaaggtaatggtaaagggaagaagggttcacgcttcaaatagtattagttagattggtgtggtgatgatgatgatgattgatgaaaactcctctacacgtttgtgtatatatacagaggaaatattcttccaagtaaagcaaatttcttgtcagactacagttttatactagaaactagattgttctcttcttacgatatctctagcttagagctatagagattactctactgtgatgaaactaaagtagtttgcatttaagtcaaaatgccaaatcaatatcattgtttattgaaagctgtttcagattgtaaatgactagatgtgtttggtgtgtgcttgattcagccaaacggtaaaccgcaccgtttctttgatttgaatgtttgttgtataaaatgggcctttagatatgttatataacttgtttgggcttc

SEQ ID NO: 911 - DNA, 772 bp, Arabidopsis thaliana
ccacgcgtccggattatttcagcaccaacttggaaaatgggattttttaagcaaaagcagaggaacatactatgaaggactaatgttccctatgcttgttacagaacaacttgagctttggcctgaacaacatgttaggcaaagaatctgggtcagtagctaaataaaactatgttttctttagatattttgtaacatatctagtgttttactgattgatatgaatttattggggacaacagatgaatgtaaccgaagcaagagaagcttgtagagattggtggatgaaagaagcattagatgttttggttgagagactttcatcaccaatgaatcaaccaaaggaagagaagactatgtcaatctctattgaaacaatgtgttgatgatgaagctgatgattgctaaattgctgattgttgatgggagtttttatgagctaatatggatctctgtaggtattaaatagatgggtttcaattagttattgagacggctaaaaaaatctatttcgaaaagccggtgcagagagcatggacaaagaaaaagatggtagagttttaggttttggatcagaaagattaacatcatgtgatttaagaagtcttgtgtttgtgtttataatgtttctgcaagaacttcttaagatatgattaagagggaagatgataaacttagagtgcaagcaaaacctgtataattgtgtttccctctgtttatttttcctctctctttgaatttgcaatggagacatttgatttcatcaaaaaaa

SEQ ID NO: 912 - DNA, 772 bp, Arabidopsis thaliana
agatgacgactgcagcacgaccaacctgggctccagctaagggaggtaacgagcaaggtggtgctcggatctttggtccatctcagaagtattcgtcccgtgatgtcgccgctcacacaactttaaagccaaggagggaagggcaacacactcaagaggaactccagaagataaatcttcgtgatgagcttgaagagcgtgagaggagacatttctcatcaaaagacaaatcatacaatgatgatagagatcgcagaagaggaagtcagcttttactggaagactcgaaaagggatcctgaagagcggattattcctcgcagtgtagatgctgatgattctgatgttgatatcaaaagtgacgatgatagtgatgacgaaagtgacgatgatgatgaggacgacactgaagctcttatggcggaactcgaccagataaagaaagaaagagtggaagagaggctcaggaaggaaaaagagcagcagatggaagagctaaacgctaaggaagaggaacttctcaaaggaaacccattgcttaatactccaacgtcttttagcgtcaaaaggaggtgggatgatgatgttgtattcaaaaaccaggcacgtggtgaaatgaaagctcctaagcgcttcatcaatgatacaatcaggaatgacttccacagaaaattcctgcatagatacatgaagtgattgtttgtcaagagtgttattgctacttctttgtatgatgattatgactaaaagcttttattctgtctggaattacg

SEQ ID NO: 913 - DNA, 771 bp, Arabidopsis thaliana
acaagagcttgccagccatcgtcgggttgggttccactctattgggattaaacctccaacagtgtcgatccatttccaattccactgtcgacttcttagtcgagcgtctttacaaatgtgacatcctctcctgatcaacaattccactgtcgacctctccacttataatgtaaggtattttagtccgtccaagttcgtttatcaagtctcaactctttttcaggctctgtgatctacgcgtccctctcgctaggctcggtacccggttttccttcttttttccaagcagttcgcttccggtttctttttttccagtcaatggtttttttgcagggtttcctttttatcaaggaaactctaacttatctcgaaatcggaaggttgtgtgttgcttgagaatatatttaccgggtagacgagattttagggtttatcatctcctgtttcttgctgctttggtgtcttttacgagccagttatctattttatccccgtcgtttgtctttgttgggtttggttttcctcggaagggttttgtatgatatgtacgggttcaggtttggttcaggccttggttctctcagaggtttgctctggcttttgttgcaacaactctattaaagagttttttttgggtttttttttttgccagagccctcgttttttttccaggcactgtattacaatctgtatgacactgtactaaattatgtaatgccctttgggatggtttaatgagtattgaataaaattctcatttcgttgtaaaaa

SEQ ID NO: 914 - DNA, 771 bp, Arabidopsis thaliana
  misc_feature (1)...(771): n = A,T,C or G
tttcatttactttctctattcaatctcacacgcgctaaaccataacccgatattactaatgacgaactacggtgcgattccgacgtcgtctcatgcatctccgttggtggatgtcgagtctctctcacgcgctaaacaccgtatcaaagccgggctagccacgcgccgtgcttggagagtgatgttcgatttccactccatgggactgcctcacggtgtctccgatgcgttcacaagaatcaagaccaatcttgcttacttccgtatgaactacgcaatcgttgtcttgatcgttatcttcttcagcttgatctggcatccgacatcgctcatcgtcttcaccgtcttggtcgttgtttggatctttctgtattttctccgtgatgagcctatcaagctgttccggtttcagatcgatgatcggacggtcttgattgttttatcggtgttaaccgtcgttttactcctgttgaccaacgcgacgtttaatattgttggagcgcttgtgaccggagctgtgttggttttgatccattcggtggttaggaagacggaggatcttttcttggatgaagaagcnnngacgactgagacttctgggctgacgtcatacccgtcgacttaaatcgtttcatctcgaaatttgtgtatcttttctatttttgtatattatcttgtttttttaattatgcgtaatcaatttttattggtgtgagtttggtttgagactttctctctctcttttgttttctgagttttgagctctgtctg

SEQ ID NO: 915 - DNA, 771 bp, Arabidopsis thaliana
ccatcacacggaatgacatgggttcctatgcttcacgattcccgcttggatgcttatcagatgcaagttacaaagatgagctacgggcagggtatgcttagcttagatggggaaaacggaagagtagggaaagtcttatttgacacaggaagttcctatacatacttccctaaccaggcttactcccaattggtcacatcacttcaagaagtttctggtttagaactaacacgcgatgattcagacgaaacactgcctatctgctggcgagccaaaactaacttcccgtttagttccttgtcggatgttaagaagttcttcagaccaataactctgcaaatagggagcaaatggttgatcatatcaagaaaacttttgattcaacccgaggattacttgatcatcagcaacaaaggaaatgtctgtcttgggatattagatggaagcagtgttcatgatggttccactattattcttggagatatctcgatgcgtggacacttgatcgtgtacgacaatgtgaaacggagaatcggatggatgaaatcagattgcgtccggcctcgtgagattgatcacaatgtacctttctttcaaggctgaaggagccataattcttacatatgtgatatgtgtataattaacctgacacatacacgcttgtataatagtactcgtgattacatattgtgtaacataaattgtaaaagactaatcaagttttgatctgtaacatatcaatgcaatcatattaataataaaaaaaaaaaa

SEQ ID NO: 916 - DNA, 771 bp, Arabidopsis thaliana
ttttttttttttttttttttttttaccaacacactctgtatttttttcatcttgtatagttgtattggaataaaattttacaataaacagtttgttcttgtaattgttgtatcatgcacacttattactatacaattacttcaaagaccatcacgaattccgatctttacccaaattacacacttgattaaggataaagctaatttgtgccaaatccataaatttaaaatttaccccgttctgtttttcattaactaacttaactacacccgtttggagcaaacccgacccgcccacccgcaccatcatacacaacttctagcgtttgctgctgaacgtttccaaagatggcagcgttactgtcatcgctattccctgcaaacgccagacaaacctgagatatcttaaacacgtaaaatatccctttcgaaccaagctccacgacggcgccaccgctgaaagagaacgccactttcgggatagtcaccgtcttaaacccgctgagatcgaaacacgtgtccaagatcgagacgcccgacgtggtcggatactttgacatcttcgccttgaacgagcttcttaacgccgcgtaggctttcggcgggagacgagtgataacggtgccggaatcgattaaagctcccggagtagagaatacagttgaaggaatcggcaatttctgaccgccgacggtgattgcgacgatattaaggccgtagaaggaagttccatcagtgatggttgaaattggtgtgaatttaacggatctgg

SEQ ID NO: 917 - DNA, 771 bp, Arabidopsis thaliana
ttttttttttttttttacataatcataataaaattgcattatagatgaagaaactgaagctacaaattacataagacaaaagaaaaaaagattacataaaatgaaaactgtggcatggtcgagcctgacaaaaaaccgcaagctggaccgacacagagagactaatacaaaccataatacaaatattaacatacgaaatttaacactaatccatatttaattaattactcttgggccagtcatgcaatttcacaaaaactccattgcaagcggctgaatttcctattttgcccctaagctagaatcgaatcccaatcgatctcgtacgacggatacttctccaacgagaacgtctcgttccactgcggcggctcctccgggtcagcgaacgtcaagtccgacaacggcgaagatccagcggtggactcttcaaactccgtcaccggtggagatccaccgatcgaaaccgaattctcctccgccttcactttctccgatagatctggcgacgaaaccttcttctcacgtttcttcgatgatttcgtcgatttgtcctgtttctgagtctccgccatgcttttacaaatagcttcaagcttagcgtcgactgaggagtgaagaggtttatattcaccgaaatcgcctccgatgtgagatccgttatgacgtaggttagggaagttaagccgggcgaaatcgccgcgcagcttgtacgccgccttatcataggccaacgcagcttcctccgccgtgtcaaaagtcccaagccag

SEQ ID NO: 918 - DNA, 771 bp, Arabidopsis thaliana
gcacggatatataaattacatattcataaatcagacatttgacaatccgatagaaattgtctcataaagagaaaaagaacacagacaataggaaatgaaatgagcagagataattcataagaatgttttagaaaagaaattaagcttcggtgaagcttgggggcttgtaggcaatgaaactgatgcattggacttgacgggtgttgtcgaatccgatgatcctaatgaaggcgcccgggtactccttcttgcattcttcaacttccttcaacacttgagcggagtcggtgcatccgaacaatggaagcttccacattgtccagtaccgtccatcgtagtatccgggagtgtttccgtgctcacggtacacaaatccgtgctctaactcgaattcaacacaaggaatccacttgttgcggagaaggtagtcaacttccttagccaattcgacgtcactaaggtcagggaggtaagatagagtctcaaacttcttctttccaattggtggccacaccttcatgcagctaactcttcccccgttgcttgcgatggaagtgatgtccttgttggtcttgcgggtgaccgggaatgcagcggatgacttcaagccggtgaatggagcgaccatggtggcctgagccggggatgtaaccacagcggcggaggagagcatagaggaagccattactacttcttgttgtttctcttcttctttaccaaatggatattatcctcagtcaaatccagcggcggaagcgaaactccacttcc

SEQ ID NO: 919 - DNA, 770 bp, Arabidopsis thaliana
  misc_feature (1)...(770): n = A,T,C or G
ggagaatctccagaagcgtatcatgtggccttcgtctcgaaactcttcgcagcctcaagctatgagacaagaaaagaagtcgatatctgtgagttttagagcagagaatctcataccaggggttgtgataggattcatcataggtatgatattggatttatcacagcaagtgacctccccagtgaaaaggagcagacttttatccagcaaggtccagaagcagagttctgtaccaggcaatggcaaggaccaagagcttaaaatggtactggtagttaggcaagacttgaagatgagaacgggcaaaattgcgtcacagtgtgcacatgctgccaccggcatgtatgcagagttgatgcagagtgaccgataccttctgcggcgatgggaggaaaatgggcagccaaagatagtcgtcacttgcaaaaaccagcnagaaatgaataagatcacagaggctgctgagagcgttggcctcccgacttttgttgtagctgatgctggaagaactgagnnnnnngctggatcaagaacagttcttgcagttggacctggaccaaaggagttggttgattccataactggtaggctggctnnnctctgattcaggagctttttcttnnngtagttcctctgggattttgatttctccaggattaaggttaattcaggcaaggcaatgttgttgtgtaatgattattcaaggtacatgttagatttgttgttggttaatttgcttgtagtagttcttccaccggttttttggagtt

SEQ ID NO: 920 - DNA, 769 bp, Arabidopsis thaliana
  misc_feature (1)...(769): n = A,T,C or G
ccgatctcgtcgctgattctcttttcttcggatccttctagataatggctcgatctttctctcgttcactttctctatccaaaggccntttcgccgccgcgtcatcctctctcctcccttcgtcgcaccttgtttcattccgatctcaatcttccgatcgtcggggagatctgtacgagattgatacctccgcagcttctcaatcgccgtcggatcctttaatacagaagctagaagacgccgttcaccggatttntgtgcgccgagctcagcctgattggctcccttttgttcctggtgcgtcttattgggtccctcctcctggatctggatctcagtctcatggaatcgctcagctcgttgtgaaactcgcgaatccgttaacacacgaagaatctttatctaccaattcttctcatggatggccttcctccgattatttccttaaaggtgttcaacctcaattgatggagaccaagaccgagacaacttcaaattccgaatctcactctgaggacgaggaagtgtaaaaatgacactgcttgtttgggctcttcaggatctcttgtcaagaccaagagctgccgaattcggacaaccaagagcaagtgaaaagacgtgaaatagaacgaccatatttctatacctgataccaaaatgtggaatatcgaataagactagtgttgtaggcttgtgtagcatgtcccgctgtttctcttttaaacagttgttgtatatgtatatctctgtttccttgctctttcactta

SEQ ID NO: 921 - DNA, 768 bp, Arabidopsis thaliana
  misc_feature (1)...(768): n = A,T,C or G
ggcgttgacttacgctttcatcatcaaggagtttgttgtcaacgttgaaggtggaacgttgaacatgacgtttacaccggaatcatctccgtctaatgcgtatgcgtttgttaatgggattgaggttacttcaatgcctgatatgtatagtagtactgatgggactttgactatggttggatcatctggctctgttactattgataacagtactgctcttgagaatgtgtataggctcaatgttggagggaatgatatctcgccttccgcggatacgggtttgtataggtcgtggtatgatgatcagccttatatatttggtgcaggacttggtattccagagactgctgatcccaacatgacgattaagtatcctacggggactcctacttatgttgctcctgtnnatgtttattcaaccgcgaggnctatgggtccaacagctcagatcaatctcaactacaatcttacttggattttcagcattgactctggtttcacttaccttgttagacttcatttctgtgaggtttcttcgaatatcactaagatcaaccaacgggtgtttacaatctacctcaacaatcaaactgctgagcctgaagctgatgtgattgcttggactagttcaaacggggttccgtttcacaaggattacgtggtgaatcctccagagggaaatggacagcaagatttgtggcttgctcttcatcctaacccagttaacaagccggagtattatgattctcttcttaatggagtggagat

SEQ ID NO: 922 - DNA, 768 bp, Arabidopsis thaliana
  misc_feature (1)...(768): n = A,T,C or G
ttttttttttttttttttttttttttttttttttttttttttttttttttttttttttttttttttttttttttttttttttcttnnntaaaccattcaacatttcaagccatcaacaagactaccataggggggctnnngacttttagcaatttgtagaagacaaaaaacgggagagagagagagaagaatctgaaaaacaaaaatacaacaaaagtttggggggcaataacaaatagtaatacatgtttttggtaaagaagagcattgatagagagaaagatttacttcttctaaggtttataaaagagtgttttttgagtccatgtaatcaaatccagtcttcttggaagaagcttatttctactactcatcgaaggtgctcaagaacccaccaatgaaaccagctccattgcagtccccacacaacacctcctttttacctctgcaaagccaacagagtgcaccagctttaaactgaccattgaaatgatcaatcaaattcacaccacctcctttgcattgagaacatgccacacaaccttccccttcacaatttgcacaaactaaactgtttggtttagtgccctgaggattattgtttgcggccttaacttcaaaactttgggatcttgaagtctgaagcagttctctcttctgtaccaaggaagaggtgttatcattagttgagaagaagtgagaaggtttagggtttttgcttggagattggaagcaaaaggtaggaggagaagagaagaagcatagtga

SEQ ID NO: 923 - DNA, 768 bp, Arabidopsis thaliana
tttttgccgaccggagaaaatatcttcttgccgtcttcttcttcatttcaccaggaacttttatttgaaatcggtttgatttagccatggcaaacgcggcatcgggaatggctgtgcatgatgattgcaagctgaaatttatggaactgaaggcgaaaagaacattccgtaccatagtctacaagattgaggataagcaagtgattgtagagaaactcggtgaacctgaacaatcatatgatgactttgcagctagtcttccagctgatgattgccgatattgcatttacgatttcgactttgtcactgcggagaactgccagaagagcaagatcttcttcattgcatggtctccggacactgccaaagtgagagacaagatgatttacgcgagctctaaagataggttcaagagagaactagatggaattcaagtggaacttcaagctactgatccaacagaaatgggtcttgatgttttcaaaagccgcaccaactaagtaaaacaaaaccctgtaagggcatttgaataagtttggtttctggagtgaatatgtttcctctgactgttatgaaaactttttaacaccttcaacttcattctacttggtattattgtatgtctttgatgtgttatgtgtgccttgtgatggttttcaattagttttacatgtacaatacttgaaatcagattgttgctaggcttcaagccttgtctcagttatctatctgataatttattcgtatatgtttggagtcctaaaaaaa

SEQ ID NO: 924 - DNA, 768 bp, Arabidopsis thaliana
  misc_feature (1)...(768): n = A,T,C or G
ttttattcgcttccgttgagatcggacttcttgtcgcggtggttatttcgtttgccaagatcatactcatatcaattcgtccagggatagaaacgctcggaagaatgcccgggaccgatacttttacagatactaatcaatatcctatgacggttaagactccaggagtgttgatttttcgtgtcaagtctgcattgttgtgctttgccaatgccagttcaattgaggaaaggattatgggatgggtcgatgaggaagaagaagaagaaaacacaaagagcaatgccaagagaaagatcctctttgtagtccttgatatgtcaaatttgatcaacgtcgatacatcggggattactgctttgctggaactgcataacaaattaatcaaaactggtgttgagctagtgatcgttaacccgaaatggcaagtaatccacaagctgaatcaagcaaagttcgtcgacagaatcggtggcaaagtttacttgacgatcggcgaagctcttgatgcttgctttggattaaaagtttaagnnncagtnnncaaaggaccagttgtgttacgggttattgcatgtgatgaatttatgtgagttgttgtgattnnaataatgtgatgcatgcatgatcatgtataatatttaagtacgtatgtgtaatagagtgctcggtcgtgactgaataaagtcatgcaaactataatgnnncgatcgatatgggtgtgtttgtaactcgatagatttggaaacaatgtataatatatgtaag

SEQ ID NO: 925 - DNA, 768 bp, Arabidopsis thaliana
tccgaccattgaggtttaacttatacaaacagatctttttgaaattggattcatctaagaagcagactctgttttcatggctgtttacaataccaaactctgtttggcctctgttttcttgctcttagggcttctcttggcttttgacttgaagggtatagaagcagaaagtcttaccaaacagaaactggactcgaagatacttcaggatgagattgtgaagaaagtcaacgaaaacccaaacgctggatggaaagctgctataaatgatcgattttcaaacgccactgttgcagagtttaagcgtcttctcggtgttaaaccaacaccaaagaagcatttcttaggtgttcctattgtgagccatgatccatctttgaagctacctaaagcttttgatgctagaactgcttggccacagtgcactagtattggaaacatcttagatcagggacattgtggttcttgctgggcatttggtgctgttgaatcactatcagatagattctgtatccaatttggcatgaacatttctttatcagtaaatgatctcttagcttgttgtggattccgttgtggtgatggttgtgacggtggctatccaattgctgcttggcaatacttttcgtatagcggtgttgtcacagaagagtgtgatccatactttgataataccggatgctctcacccgggttgcgaaccggcatatcctacaccgaaatgttcgaggaaatgcgttagcgacaacaaactatggagcgagtcgaa

SEQ ID NO: 926 - DNA, 768 bp, Arabidopsis thaliana
ctagacataagatgcgttgatggtaaagaagaaacgatacgcacatcagattcacagggttttacttctttttttggagacacaagatctaggatttcctttatttagagacgagggattctatggctaacactgcctgctttatcattgtgggccggaatgatattcccatctatgaagctgaagttggatctgctgctaaaagagaagatgctgcacagttgcaccaatttatattacatgcagcgttagatgttgtccaagacctagcatggactacaagtgccatgttcttgaagtcagtggacaggtttaacgatctggttgtgtcagtatatgttaccgcaggccatacccgactgatgctccttcatgattcacggaatgaggacggcatcaagagcttctttcaagaggtgcatgagctttatataaagattcttctgaatcccttgtatcttcctggttctcggataacgtcgtcacattttgacaccaaagtacgtgcacttgcaagaaagtacctgtagagaagacggagattctgtttgcatttggtgatcaaatttttcttgtacccatatcgcatagttcccaagtcaattgtttctgttttctttttgagtgcctggatttctgttatttctaacttgcaagcaacattttaataagaatgggattccttgtttagtaaaaaaaaaaaaaaaaaaaaaaaaaaaaaaaaaaaaaaaaaaaaaaaaaaaaaaaaaaaaaaaaaaaaaaaaaaaa

SEQ ID NO: 927 - DNA, 767 bp, Arabidopsis thaliana
ttttttttttagttgagtattagatttatttacaaaatagtggagatcaaatctcaaatacgtaaaacaaagcaaagagacgcaaacacagaagtccataactttaaagtgaccaaaagatctctttttaagagaagtgtgtgccattacacaatataactaagcacaacaagatgagctcactgccctatccatggccctgtctggcagaaccattcctgttgggttttctgttggctgtactcgcggtagccttcttgcgatttcatagaatatctctttgacattagtagcggtttttgctgaagtttccatgaagaaaagaccgttttcctgagcatatgtttgtgcatcctctgctgtcaccttccttgcatctaataaatcagatttgtttccagcaagggccatgaccatattagggttaccttgtgcctgcagttcctgaacccatttctttgccctctcaaacgaagcctgattcgtaacatcaaaaacaatgattgcagcagcagcacctctgtagtacattggagccaaactatggtaccgttcctgacccgctgtatcccaaatctcaaacttcacagtggcatcgttcacagctaacgtttgtgagaaaaaagcagcaccaatggttgattcctggaattcaacaaactgatctttgacaaaccgtaacacaagacttgattttccagcaccaacatctccaagcaacaccaatttggcgttaatgctcttgtttccagctgcagccatggatt

SEQ ID NO: 928 - DNA, 767 bp, Arabidopsis thaliana
tttttttttttttttttttttttttttttttttttttttttatacaaaaggtgccaaattttctttaaaataacgacgttacatcattacatgacaccagtagaagctaaaagccaccacatcattacatgacaccagtagaagctaaaagccaccacatcaggaggaagagaaggtatcgataatggtggtgtgaagtgggtcactaaggtgagtcgcccagttgttgagcggtcctttaccggttgcagccgcctgaaccgcaaaacccaagaatccaaccatggctaaacgagcatgtttgatctcagctagctgaagctgagccttcttcaccgggtcagacgctagtcctaacgggtcaaagaacttgcctcctggatacaaacgcttctccgagtccagttcagcgtttcgttggaactcaatgtagccgatcactaacacttcgatccatatcaatgtcgagatagagaacggcaatggctgtcctaagtaagatgatccatccactagctctaccttgccggcgtcttgccaagtaacaccggtgagccattcgacggtgatagcgccaagagtggcgagcattgcccaccgaccgtgaatcagctcacattctctgaatctttgtagcccgaagacttcactatatggctgaaacggcgtcgatttggggtccaccgcctcggtacgagtcccgatcacttctccgtataagttcttggctaagttctggtccaaggaatccaaatcgaattggagat

SEQ ID NO: 929 - DNA, 767 bp, Arabidopsis thaliana
cggccgccttatacccttcgaccaacgaagaaccctagaaatcgattaacaagatgaatagggaaaagttgatgaagatggctaacactgtccgcactggcggaaaggggacagtaagaagaaagaagaaggctgttcacaagaccactacaaccgatgacaagaggctccagagcactcttaagagagttggagtcaattccattcccgccattgaagaagttaacatttttaaggatgatgtagtcattcagttcattaaccctaaagttcaagcttcaattgctgctaacacatgggttgtgagtggtacaccacagacgaaaaaattgcaagacattcttcctcagattatcagccaacttggaccagataacttggacaacctgaagaagctagcagagcaattccagaaacaagctccaggtgcaggtgatgtcccagcaacaatccaagaagaggacgatgatgatgatgtcccagatcttgtagtgggagagactttcgagacccctgctactgaagaggctcccaaagctgctgcttcttagaggaggaggaagaagaaggagaagagctcacctgcaaaacccatcataaaaatgtttgtcgctcgacctcttctgagcactgtcagattcttgttttctctaatgcttgcgaacagaaagacttggttttattatcacttgatgctttttggtccgaacagcaattttccttttattaaggttagatcgctttttgttaaaaaaaaaaaaaaaaaa

SEQ ID NO: 930 - DNA, 767 bp, Arabidopsis thaliana
cttttttttttttttttgcaaaagtaaacttgtttattggcggcacacttttttttcttctctacggagtacaaacggaatgaaacagaagctattataacatggtttccttcctcacttgctcttgtgttccttcgtgttactagttgaggtttctctaggcggtcgcacaatgagaattggacattttgcatgttgggcacagtagtcacttacactccctaaaaatgcccttttgatcatgccgagtccacggctaccaacaacaagaagatcaacatgtgtttgctcgacggcttggcatatcatctccttaggatctccttccaatatcatagtctctgtcttcaccattttgcctcggcatatctccaatgcccgtgtgaataagtttgtcgtactctcttctcgtgctttcctcattggttcgggcactgaatctgtcgcatacaccgccgaagcagttccaccagaaggatagatatattgaaggtacgttgggtgaacatgaagcaacgtaagtaaaccgccttcttgaccggtttccggttcggcactaataacaactctgagatgatccacagcccattccaacgcatcgaagctgttcttgctctcatcaatcgcaaccatcactttcaacttcttcttgttcttatttgcagccgtctccgccgtcgttgttgtggctgccgtgtcctctccaatcgcatcaacgtaagtctccattttttactccgtacgttttctctatcgcggacgcgtgg

SEQ ID NO: 931 - DNA, 767 bp, Arabidopsis thaliana
ttttttttttttttttttttttttttttttgaaatgataactataattatagagaaactgataggaataacattttcactttcaaacaatagttcctcaacttttaagtcggcaaataatttcttaaatttgcattgaccacatagaaatgggttccagaataatcaacgctgaatattccagaaaggggattaagcttcggtgaagcttgggggcttgtaggcaatgaaactgatgcattggacttgacgggtgttgtcgaatccgatgatcctaatgaaggcgccagggtactccttcttgcattcttcaacttccttcaacacttgagcggagtcggtgcatccgaacaatggaagcttccacattgtccagtaccgtccatcatagtatccgggagtgtttccgtgctcacggtacacaaatccgtgctccaactcgaattcaacacaaggaatccacttgttgcggagaaggtagtcaacttccttagccaattcaacgtcactaaggtcagggaggtaagatagagtctcaaacttcttctttccgattggtggccacaccttcatgcagctaactcttcctccgttgcttgtgatggaagtaatgtcgttgttggccttgcgggtgaccgggaaagaagcggatgacttcaagccggtgaatggagcgaccatggtggcttgagccggggaggtaaccacagcggtggaggagagcatagaggaagccattacttcttcttgttgtttctcttcttcttt

SEQ ID NO: 932 - DNA, 766 bp, Arabidopsis thaliana
  misc_feature (1)...(766): n = A,T,C or G
aataacaacacttacactgattaaacaaccaacatacatatacaaaatctatgtatctagatattattcccaaaatatacaacataaaatcaaacacattacccaaaaaagcaaaacaagataaaaataaacaacattaagattgtactgaaaatgacaatgctgttgaatctgcaccttcttacctcttttaggtgtaaatacatnnnnnaagactatgaacgtannactttnnnctgcttcacacattccggtgactttaagtcctgacacttccatgatggtcgttctataacctgagccacaccaccattataaccttccgacttacttacacttagattgttttcctctaatgtgataccgttttcttgatccttgtaggcacacatgctcaaagggagcttcactcttcctcttcttttccctaatgagctactctcttcctctgttttctcctttagcgtgttatcgcataagagcagcttcccgtttactctggttccgtcatctgaatccacaacaccagcaacatcattcccatcgttcatagtactagtcagagtcttttgcttcttgtttctgtgaccagaacaatccgtcaagactctaggagaattgtttatagctcgaatcaacctaggctctttacaagaaaccgtctcagctgcgggaaaagaagcaaacaattccaacgcattcttggctgcagccactgctttagaagcaatgatggccttctcattagcagtagctctcgccgcct

SEQ ID NO: 933 - DNA, 766 bp, Arabidopsis thaliana
tttttagagaaacatagatattttttactcaaaagactttgacgaacttcaaatataagaacgagtattgatcctaggagtaatgatacagtgtgattcagagagattacagagcagtggcggggggaaataaccagcaaaataaaagctttcttataactttgatgttgagatagatttcagcaaatgtaatgttatttggatgaaagagatcttttcagttttcaccctccaatttatcatgcgccgcttgcataaagacgggtccattccttagctgtatccacagcttctgcctcattactcttccagtgcttagcaatgttctcagaaagcggatcatctgggtttggtgcactcagaagagcttgaatacttaagagcactgttcgtatttgtagtgcagggctccatttgtccttgagaatatcaagacagattcttccaagcttgtcaatgttaggatggtatatctttgtgagaaacctaaccttgggagctgccatagggtattcttcaggcaaaaagagctccaacttgaaaactcctccttcataaggtgattgtgtaggaccaagaatcataacgttgaaataccgcatattatcctcagatggagaggcacttataccgggagccggttcactgagcagacgttgagtttccttgatgattcttcgcggcaaattactgttggccattatcacttgtcgatcgagctcagagagttagggtttttgaagggagctgctgatgataatcgaga

SEQ ID NO: 934 - DNA, 766 bp, Arabidopsis thaliana
atttcaaccatctcttttgcctctgttcaagacttttgtgtagctgacccaaagggtcctcaaagcccatcaggttactcttgcaagaaccctgaccaagtcaccgaaaatgactttgcatttaccggcctcggcacagctggaaacacttccaacatcattaaagccgcagtgactccagcctttgctcctgcttacgcaggcatcaatggccttggcgtatctctggctcgtcttgacttagccggtggtggtgtcatccctctccacactcatcctggtgcttctgaggtccttgtagtcattcaaggcaccatttgcgccggatttatctcctccgccaacaaagtttacttgaagactctcaacagaggagattctatggtgtttcctcaaggacttcttcattttcagctaaactctgggaaaggccctgccttggcctttgtcgcattcggaagctcctccccagggctccaaattctaccatttgctctgtttgcaaacgatttgccttcagaacttgttgaagccacaacgttccttagcgatgcagaagttaagaagcttaagggtgtgcttgggggaactaattaagcttctcttagtttcattgttcatttttttaaaaatgtggttgtgcgttttgttatttcgagttcctttagcattttgagtttgtttcttctaatgatttggtttttctttatgagttgttattgttctcaatgtttcattttatagtctctttggcttcaaattgtaa

SEQ ID NO: 935 - DNA, 766 bp, Arabidopsis thaliana
cttttttcacaacctaactttaggttaagaaaaaattaatcttataacattcattttcaacaatagttttatttttgccaaatcaaatcacctactatttattaaaaccaaaagaaaaaaaaaattcacctatatctgtattattgttttactatgccaaatcaaatcacctatattaaaaaccaaacgaataaaaaaagccccacctatatatatacatcttaccaaactagagtttttaagaaatgaaatcacctctaataactaaggtaaatatctaagcattcggttcatacatatcttaacatttatacaatcttggtctactcaagaaatccagtttgcttcaatattgcattccttactttgctcaaatctcttcctttcagttttcttccaactccttccataactgaagacgacgatgatgatcgactgcgccgcaggaaatattcctccggtgacacattctcatcatcaacaactttctttgtcttctttctttgaaccattgaccaatcagggacattgacagggaccgactgttgtctcataggtgccattccttctgtcctctgcctctcaggaatcattctaggttcgcttggaagtaaagtttgggttgagaaagaaggtttagtcgtatggttactactaatcataaacggtgattgatatccatcaagaacatcccacacatcatcttcttgaaaatctccatctccccatagctcatgcttcatgtagctcttctccattgatactc

SEQ ID NO: 936 - DNA, 766 bp, Arabidopsis thaliana
ttttttttttttttttttttttttgaagtatcaactgataaataaaactgaaatgaggtgataaacttcaacagtgatacaaggaagaaaacaaaatctgaatagataaaaaccaaaacaagagttaaaccaaaagatagatgctgattttcttcagtacttgatcgatgcaagaacatcgagctgggatccaagtttctcctctgcaaccttctcggcctttgccctgagcttggtgagttgcttcttacgctcatacaaagcttgtgacctctcctttctcttcacctcaagctccttgatggtatcgtaatggttccagccaacttcagaagacaaacgtcccaacaagcagtacttgtgaccagcctgaagcctcaacaccttgagagcatcaggaatgaccattctcttgaccttgtcataaggaggtggtactccctcaaacaccttcaaacgtgcaagagcagcagcaccacgcttggtcttgtgtggaatcatcccacgaacggtacgccagaagatcttagacggagcacggaaatgaataggaccatgagaaggtttagtgttcatgcgtttcctaagaaacctcatgtacttcatcttctgacgaaccaaaccaccagacaaacaaatctcctcacatcggacaacaacaacactctgtccattgagcaactctttagctatgatcgaagcaagacgaccacacatatggtgacgtgcgtcaacaacgacacgctttgaacatatccctgaccca

SEQ ID NO: 937 - DNA, 766 bp, Arabidopsis thaliana
cttttttttttttttttttttttttttttttttttgttttttttttttttttttttcttcactagaatggtaaattatattgatgaaataagttctgaatacaataggcggcaatgcaatcaaaccttccaaagacataagccggcgagtacatgtagactcctagaaacaaaaatctaattaagaaaaattaaagaggaaataaactcaaacatacaaatacacgcatctgaaccaatcttctcggaatccaaactcaaaaaatcaaaaataaaattacaaagtctaaatcaccataaaaacaaacagattcacactaaggaaaacaaaaccaacaaaaccaggactctctttaccacaaacggcggtgaacaaacaaacaccccgcgacccaaatgatgatggtcataagaagaagaaaggagatcgagatcttcaaaggagagaaatctacttctgaaggcggtgaaagaactcgcctctgccgaggttcgaacggccagaactggtgctgcacataaaagggacaaaaacaagcagcaaaatccaaagacgaaaaatttagaaattgtagatttagatctgaaattttagatctgaaaccgttggaaaaaaaaaaggttcagatctgtcagagaggaaggaaaacaaaaactaaacatgaagaaaccaagaaatttcggttctggtgctgaaaaagtcactgggaccgaaaccctagcaacaacggcggcgactttgttttatagagagaaggaggagcgcg

SEQ ID NO: 938 - DNA, 765 bp, Arabidopsis thaliana
taattattttccaaagatatgaaacacaggaaacacagtacatgttttagtaaagatatgaaattttaacttagtattttactggaaaacgtacttcacatacattagagaagctagggttacatactttgcatagtatttttattcaaaacatcttcaaagtttggagtttggtttgatcactgaaatcgaactggaagaagttttagtggtactttcttgacgattgtaagagtgccaacttcttcagtatcgatatctttatgtgtcatcccatcaggcaacttccagtcgaagaagtaaagtaagttcaagagtcccaattctacagtagccatacccatcgatatcccgggacatatccttcgtccagacccaaacggtaagagctcgaaatgttgtcccctataatccacaggactattgataaatctctcggggttaaactcttccgggttagtccagagttttggatctcttcctatcgcccaagcgttgaccaagatccgtctcttgggaggaatatcatagccttgaaccttgatgtgagccattgtttcccttgggagaagaagaggaactggatggtgtaatctgaatgtttccttgatcactaggttcaagtaaggaactttattgatatcttcttcggtgattctctctttatttctgccaaggcggtctcggatctcgccttgaactttcttcatcacttccgggtttctagcgagctccgtcattgcccatatcatagtaagagctccg

SEQ ID NO: 939 - DNA, 765 bp, Arabidopsis thaliana
  misc_feature (1)...(765): n = A,T,C or G
agggagaaagtgaaatatttcttcggaatgtgttcgagaatatattgaaaacgtacctaaggaagaacccgacggcgaagacaatatgggaactggttcagtcgttggacaacgaaaagatctgctacgaccacttcactttcaggacactaaaggtcgatggttatggaatagactccttgtcgagttttttcatggcttatggatataaaattggtggtggacttgattttcccaagaagaaactacgagttctttggttttctccacctgatgttcacgttcctaatgatggtcacggtctaggcaacggccctttgccgcgacttgttatagctgaggttcttgtggacgaactaagccctgaatcacaggggataataaggaagtatttgaaacaagaaggtggcaagcaagcggttctttctagtactttggggtctttaatatgggagaagcctacatggaccgacttcaagcagcttgccaaagaaagcgaatttgcggcatggacgcttatccacggctacacaatgaatcatcttgcttttgcggttcatcgattcaaacatcgtttcagtgacatcaaattcgtcaaacagcgtcttgaggaaaagggattcaaactcaacagtgacggagaaatcctcaaagtgagtcaagatgntctactatttcaagtttcatcgatctcggaaaggcttccggtnncatttgcagatggagtaactgaaacaatcccagcttcatacattgaattcactc

SEQ ID NO: 940 - DNA, 765 bp, Arabidopsis thaliana
ctctgtatataccaaggaaacaaaggaaaagctatacgtgcaggagtgattcccacgttgactagactcttgacagagcccggaagcggaatggtcgatgaggcactcgcgattttggcgattctctctagccaccccgaaggaaaagcaatcataggatcctctgatgcagtcccaagtttggttgagtttatcagaactggctcgcctagaaacagagaaaacgcagctgctgttctagtccacctctgttctggagacccacaacatcttgtcgaagcgcagaaactcggccttatgggtccattgatagatttagctggaaatgggacggatagagggaaacgaaaagcagcgcagttgcttgaacgcatcagccgtctcgctgaacagcagaaggaaacggctgtgtcacaaccggaagaagaagctgaaccaacacatccagaatccaccacagaagctgcagatacttaaagattgtctttgttttggatcctcgggtcatctctttcacgtacgtatgtttattattctcactttttgtttgtgctactcatcctccctcgaggtaggattcacggtagacgcggaagagggaaatggcctccttctccgatctacttttaactttatggtgatatctttgtgtggacagagcaatctggtccacaggagagaaaagcaaatatgcatacatacacgtcaacttgtatcattgtaacactatgtttgtaatcatttccacgaaaaaaaaaaaaaaag

SEQ ID NO: 941 - DNA, 764 bp, Arabidopsis thaliana
tctcatttatacagcgaaaaacatgaaccgctgagctgggatttgagagtatatattgctttagacgtggcacgtggtctagagtatcttcatgatggggctgttcctcctgtaatccacagagatatcaaatcttccaacatcttgctggatcaatctatgagagctcgggttgctgactttggcctctccagagaagaaatggtagacaaacatgcagctaacatcagaggaacatttggctacctcgatcccgaatacatttcaacaagaacattcaccaagaaaagcgatgtctatggcttcggagttttgcttttcgagcttatagcaggaagaaatcctcaacaaggtctaatggaattggttgagctggcggctatgaatgcagaggaaaaagtcggatgggaagagatagtagattcaagattagatgggagatatgatttacaagaagtgaatgaagtagcagcttttgcttacaaatgcatctctcgtgcacctagaaaacgtcctaacatgagggacattgttcaggttttgactcgtgttattaaagtgagacattgcagaaagcggcagaagaattctccgtcgccgtctccacggcttcctcctcctcctccgatagtggaggagtcagaaggtgagttaactgcaaacggatcattacgatcagaaattcatcggagggataattccttggacagtagtatagctgaagacgtgattttgtaaacaaaatgaaaaaaaggtctcaattt

SEQ ID NO: 942 - DNA, 764 bp, Arabidopsis thaliana
ttttttttttttttttttttttttttcctagaaacatacattagaaaagcgtctatcacataagttttttaacttgtaaaaagtaacaaaaaaacataaatgactaaagagaaaatttcgtttcaacaacaacaaaaaaaagtagtctaacccaagtgccaccacaaattgtctgtgtttgaggtgggcacagaagctaaagcctcttctgctctgcttttttgcctcaggcaaagtttacaccttctttaagctaacttagaacccgaagaagccgagttcactggctttttccttctcaaaggtctcgaaatactggtatatgatcgtgaccgccaacagaattccggttcccgacccgatggctcccatgaaatcagccaaaacggtaagtgcaccgatacaaactcctccaaaagctgctgctgttgggatgtatctgttcagttccttctgtaagtttgattctctgtgtcctggcatcaccatttgttgttcctttagctgcttagctacatccctagcagaagatccagagacttcaatccatgtctttgagaaaagagcacaagcagtgagcatgaagacgatgtagaacagtgcatggaacgggtgagctgccatgtcagagaaacttgctggagctgtgatgaggtaagccagaccactaactggaatagattgtccactgtactcagattctttccattgtcccaaaaggtttacaaagaaatttccgctgaacttccggtagagaagctgag

SEQ ID NO: 943 - DNA, 764 bp, Arabidopsis thaliana
gagaaccattaccgtggactaagagagtgcagattgcactagactcagctagaggtttagaatatatccacgagcacacggttccagtttatgtccatagggacattaaatctgccaatattttgatagaccagaaattccgagcaaaggtagcagatttcgggttaacaaaactgacagaagttggaggttcagcaactcggggtgcaatgggtacatttggttacatggcaccagagactgtttatggagaagtgtctgcaaaagtagatgtatatgcatttggagttgtcctttacgaattgatttctgcgaaaggtgcggttgtcaaaatgacagaagccgttggtgaatttagaggccttgttggtgtgttcgaagaatcattcaaggaaaccgacaaagaagaagcactacgcaagattatagacccgaggctcggtgatagttacccgtttgattcggtatacaagatggcggaattagggaaagcatgtacacaagagaatgcgcagctacgtccgagtatgagatacattgtggttgctttatccactctcttttcgtctaccggaaattgggatgttggaaacttccaaaacgaagatttagtcagtcttatgtccggccggtagactcgttttccggtttgctgttgttatatagaaatgattgttttttggtatgctcacgtatattttgtctgtctatacgaactttacatgtcacaactcacaagttgactaaaaaaaaaaaaaaaaaag

SEQ ID NO: 944 - DNA, 764 bp, Arabidopsis thaliana
  misc_feature (1)...(764): n = A,T,C or G
gataggagccaatgaagaagaataaataattaagagatgataacaaaaacaaaacaaannagaagcaatgactgtttgctttaataaataaagatattcaaaaattccatcacatgattgcaccgacgacagcgcaannnngcgannnngcgacagtggagaaagcagaaatgagcgaggaggaagcagacgatttctgagagagaggaatggacccgaaggcgttttggtaagagggagcgtcggcggcagaagacggagacaaggcctctgcttcggcggagtaggtgccgacggagactaggagcttctggtacttggtacagtggccggggtttgcacttgtgaagtatagggttccgttttgggtgaggttgaagagagagttgccgtcgttcatgtacaagattgggtctttggtgttgcagctcttgaaattggagggcgtcacttgaatcagtgagtcttcgcttggtgggtacaagaacaagagggagtcaccgatcttgaaagagtgagatttgggccatttggaatagactttagcatcaattgggatgccccaagcgtccaagtccccaactttgtatagagtcgacgacactttaccaatctcttgtcccaacaatatcatcacctgtaataccacaccaccatcatcgataccttctcctcatcttaaaatcattatcatgtgagattctatttgtaacttatgtaaaaacagagctatgatgatactgaatcgactttgggcgcggccg

SEQ ID NO: 945 - DNA, 763 bp, Arabidopsis thaliana
tttttttttttaagagaatgtaatttcacgtaattatcaaaacatacaagaggataacagcaaaaaaatcactaatgattgatgaaaacatcaaacgcttgttcatcagactggaacatttaagattgctaagtaatatgcgaattgagagaggaaatatgatcaatgtgggaaaggatagtccaaaacgttgtccatgacttcaaactgcatatccttcgatggccgtttcctctggtttatgaaccaattgttttatctgtttcctctggtgtctccaggcattctaatatcagatgtctagagtcaatctctgagcagaagagtaatagtgagactcgagctctttaagattggcagatgcatcatcagcaattctagccaacaatcgatttgtcttctcggcctcttgatcaaactcttctattctttgttctacatgatcgtttagtgatgcaaatcctgaaaatatcgctgtttgcttaagttctgatacgagtttcaaaagagaatcagctgcttgaaccattctagaagctcgcatctccatcatgtatgtctcctgcgagttcttcaccggcggatcactcacccttgaaacattgacgatctgcgtgaagttatcgacgacagatgtgatgtcagtctccactctctgtaacaacgccttttgcttctgtaaagccgcggcggcggcggcggccgttggaccgcttcctccaccggatccgccaccggatccaccgcctttgttcataattat

SEQ ID NO: 946 - DNA, 763 bp, Arabidopsis thaliana
  misc_feature (1)...(763): n = A,T,C or G
caacaacaatgcccgtcaagtgggttttacattggcaaccaaaccaaggatcaacagtaagcagccaaatcctaaacgaagcaacacaatgtgtagagagcatcaatggtgtgaaagaaggaagatggaaagcaacactcaactattacaaacccatgttaaaagaccaagcgaatcaattggagtttcctcgtgattttctagggatttcacttgcggatcagccgaataagtactatttcattatcaggacgcagaggattgtcttggaagctgattcttcgattcagttgattatggagaagcttcagtcttataaatctaaagtggctctttactttgatgggtttcagtatcagcttggtgattttaggttgagagttggtaaagttgttcctactcattctgagaatgttagaggcattgtcatggaggtggagtatcttcctatatcatcaatggaaaaggcacaaaaggtgatggaggagttcttggagatatggaatgaagctctggctaaaaggtcgttgccgggtaagtttgtgaacatagatctcaactttggggagtttggacttggagacatctacactccacaacacacagctgttcgttacgctctcgtgatggctcacatgattgctaccgttcaagctgtgagaggctaaaccannncannncttngtannnctaggtaaaattatgtgctttgcaatattagtgatttctttctttggtcatgtttatctataagaagcattga

SEQ ID NO: 947 - DNA, 763 bp, Arabidopsis thaliana
  misc_feature (1)...(763): n = A,T,C or G
ttttttttttattggaagagatttttttaaattaaacgcagtagcgcaacatactggatcagaagcagagaagttgtccaaggaccaaaagtactaaagccacagacccaaaccatataattgatcaatcatacaagagatttcatcccaaaaaaaaaagaaagaagaagcaaatagtaaatctctgtactccagacaaatcccaatgcaaataaaagacttccaactatgatgtattttatgtgagaccaaaataacaaagagctctaaaatagtacaaacgggcatgcgggtaatcaggaagatatagataatttaagcaaaaaacaaactgggactgtgactactttgctcaggattgcacggccagtttctgaagatgttcaataaagacttgcaggctcacatcgtcagtgaagattatgtctgacccagctgacatctcgtttgcattgttgtaagtcgctgatggattcagcttagccaataaaaaccttgcctgtgatccatgttgatcacacacaactaatctcgggactgggaaacgctcccggactaacatctgggaatcctcttgcggagcttgcaataactgagcaaaggccnnntgttcaggctgatgatgataacccatgtttcgccattgcgatatagtcattccatggaagacaacaacactaaaatatgcatctaatnnnagaatcttnnnagctgcaatggaagccacatccagcaaagctgcctgaggtcctgaattgaatga

SEQ ID NO: 948 - DNA, 763 bp, Arabidopsis thaliana
aacagaagatagcgttagaatcagaatctccggcgaaggttacgactcctgctccagcagatacaccggctccagctccggcagagattccggctccagctccagctccgactccggctgatgtcacgaaagacgttgcagaggagaaaattcaaaacccacctccggagcaaatttccgatgactccaaagcccttactgttgttgagaaacctgtagaagagcctgcaccggcgaaacctgcgtctgcatcgctcgatagagatgttaagctagctgatttgtcaaaggaaaagagattgtctttcgtcagagcgtgggaagaaagcgaaaagagcaaagcagagaacaaagctgagaagaagattgcagatgttcatgcttgggaaaacagcaagaaagcagctgtcgaagcgcaactcaagaaaatcgaggagcaactagagaagaagaaagcagagtatgcagagaggatgaagaataaggttgcagcgattcacaaggaagcagaagagagaagagcaatgattgaagctaagcgtggagaagacgttcttaaagcagaagaaacggctgctaaatacagagccactggaattgttccaaaggcaacttgtggatgtttctaatcttgaatttgcgaatcaaagtttcaagactttgtaactgtaaagtgtaatcaaatttctctgttctctttaatggcttgtaatgttgtttgtatattgattttgtgtgtgacaatcagagtgaaaaatatgtt

SEQ ID NO: 949 - DNA, 763 bp, Arabidopsis thaliana
ccacgcgtccgattatgttcaacgattacgccaactgataaaagtgtttaactatcagggatctttgtaaacaatcctcgtgaagactttctttctatcttatattgatgatgagttttatatactgactttgttttctcttgattatctagctggatatcgttgaactgcttatcaagggatgcaaatcgctcaagaactacgagaagaaggttaaaatgatcaactcaaatccataacattgccttcacgtgtttacaaattaaccatttcattctgctttctctgttggtgttcttctcgaacttttgcaacgcatctgcatgatcacatagcagttagcgtacgcttttctgatattatgttgtgtcttgtgttattacagtgcaagacgttggtgtttgaatatggacctctgatactcgtaaatgcagaggaattcctagtgaaaaacgacgtctgcacactcttgcgcgcatgcccccctgagaaatcggttctaaggcagccggagttggctgattcttgaatgttcaaaacgttgctataacaggattttaattccttatgggttatacaagtaggaacacgagctgctccatgagaatggttgcagactttgtgtagtgtctatatgtatggattcaaacacatcctccaaaatgtccctttgcctttgtgtaaataatgatcgctacaacaattgtacctctactatgatatcactgtattctaaaaaaaaaaaaaaaaaaaaaaaaaaaaa

SEQ ID NO: 950 - DNA, 762 bp, Arabidopsis thaliana
  misc_feature (1)...(762): n = A,T,C or G
aatgacaggagagggaatacaaagagatacatgaggctttcgacgaaaagaacaaagagaaagcacaccttgtttcaatcttaatggaggtaaatcaattgtagcctatcccagctctgattctctaagacttttagctttttgtatagctgtgatgctgatcgcnntctcggtgatcttcttggcagctactagctaaagatatttttgttcctcgtgagnnntgtggcgactcctcaatcagattacnngagttttgtattcttccagcaacttcgagatgtcattaatccgcaactcggaagaacttttgatatgataaaacgtaaaggtcttcgttccagggaggccaaaatcagcagatgttaagctgctctgtgtagtgaaaattcgtgtaacaagtcgctgataatctcgaagtaaggaaccaagctcttttagttgtaaagttctcggagtggactgtttccaatgctgacgaagtgcttgagcggccatctgaatcatagaggcccgttcatcaactacatctccctcaattaatcttgttcctaattcaacaaactcttgatcttctgactcctcgggaatttgaaggcgcaaccctgatgaaacagatattcccattttctgttgcaagtcaacaatactgaatccatcttgtcccctttccttgtccaactctctctctgactctttaatttcaggagggtttacaacttgaggcacagaagacctcttggctatcggatcatcttcggg

SEQ ID NO: 951 - DNA, 762 bp, Arabidopsis thaliana
atattgcttcctgaaaataacaacacaatacagtagcttgtcttactaagggagaagaaaggctaaggcccaattgttgttgaaaagcccaatgaggtcacttctggatcagctagcgggtttcaagacggctacccgacacgtgcgaaaacagacagtgatagtttccactttccactaactctaatcgcacgtgacaactcagaaagttccctgcctaaccacaagtggatcaagcgtcgtcgaccacatctgattcccgcccaatagccgtgacacaatctcgttatcggcgatggcatctacgtaattaaacggaaaatcaagggcattactcaaccgaccgttgctacacgtgaattccggtgacaccgcttgctccgagccggagatcaatctcgccacagattccggtggacacgtgtcagtcacaggctttaacccgtcctcgatatcgcttcgtcgcttctcgatgacacctttcttgttatatatacgacacaatacccaatcgtccaatcttagactgtttttcttacgaaccgaccggtcaacgtcagcgagccggtattcgtgcataatccaattggttttctctccatttggaggttttcccgagtaaaacactagagccttcttaataccaaccggtttaggacgacctattggtttatcagctccggtagctttccaatatccagtaccagctgcacggttgggtcttgaaccgtttggatactttcgatctcttggtgagaaaaa

SEQ ID NO: 952 - DNA, 762 bp, Arabidopsis thaliana
cagcattcttggagcagcttaagtctcctgaggtttcgaatcagattcgcctcgtgttagggtctgaaacacagttgcagatggtgatgtacggtataggtagcattgagtcttatgaatctccgaggtttcagctgagcattgcaatcttgatgaagagagagtttgattgggttggtgataacattgaagtgtttgacccagttctctctgcaactgaatctagttacctagaatctttgggatgcagtgttctatctgtgaatgagcaagctcgtagggaagctttaaagcctactcttttcttcatgccacactgtgaggccaatctatacagcaacctattgcaagcaaattggagaatggatcgactgtcgaaaatcgcattgtttgggaacagctttcagatgtatgaggagcaagtttcatttgacgcagaagtcatctgtgctaccaaacgaatcatagctgcacaaagagtcacaagcgagtttgctattgagacggaatcagatgattattttgcagcattccatgattcaagctggcattttttcagttctggtatagattcggagctgccattgttcgtttcagactaattttagatcattgttttcaaaagctttttgattttcacttgtgcaacattttgtttatctgtctttttcctccttgcataatcttagccttcaaggcgggcaaaacaattgaagttattgacttatcaatgcagtcaataaaatttaaaaaaaaaaaaaa

SEQ ID NO: 953 - DNA, 762 bp, Arabidopsis thaliana
gccttttcattctccgaaccgggtttggttaatcaattctcgggtttccaaaccgggttcactccttgggaatgggattgctctgatctctttttcgtggaccaaatgtctcttgaaccggccatccctagtccttgttatggtgaatccgacactggttccgtcaaaattaattccggttctcatgacatgaaaaccggttctgacgaatcttgtgccggtttcgtcaaaattaatcctcgttgtgacgacgccgacatatcaaacgatctaccgtgctctcaagcagatgaaccggactcggacgacacaaaacaattgacagccatcacaaatttcggttcgggagagaataaccataaccggaaaaaaatgatccaaccggagatgaccgacgagcggaagaggaagaggatggagtcaaaccgggaatcagcgaaacggtcaagaatgcgtaaacaaagtcacattgataacttacgagagcaagtaaaccggttggatttagaaaaccgtgagctcgggaaccgactccggttagttttacaccagcttcaacgagtgaattccgacaataaccggctcgtgacagaacaagagatactccggctaagattgtcggagatgcgtcggattctgatcattagacaacttcaacaacagcaacaatgggaactacataaccggagaatgatcatgactgaacaaaaccaccctcatcttcaatgatagatcaaaatatttaagaagaaaaaaaaaaaa

SEQ ID NO: 954 - DNA, 762 bp, Arabidopsis thaliana
ctttttttttttttttgtttaatgcattcaacatttctgataaatataaagcattccatcatgaaaattcaaacatttcataattatatactatatttgtaggaaaaagacatgcacctttaatatactctcacaaaattaaaataaacagagtattaattacgaaccaagaaaaggaaaaagataagaggagttaaccggcgattttgtaactcgggttagcgaggttctctaaaccggagacaacttgaatggattcgataacatcaccaactttaagatcagctagaaaatcttcgttatcagtaacgtaaccaaagacagcgtaacgaccatccaagatgttggaattgcttggtgtcagctcactctcttttagcagccaaaacacttggcttgatcctgagtcattctcaaactcttctcttgccattgccattgtcccaaaagcgttgaaaggaatcacaacctgagccttgtaaagaccaagttcttcaagagttgagccgtaaaaaggcgttttctctccagtcaccataatctctagaggaaccgtcctcgttttctctgtgcttggatcgataaatccttccgcaggaccctctggatctcccgtttgtaccacaaatccatcagatctctggatctccatgccatcgtagaaatgcctctctaccaagtccacaaagtttccggcggtaacaggggcgttataaccatcaagaacaatgcggaacacacagtcctcgatcggacgcgtgg

SEQ ID NO: 955 - DNA, 762 bp, Arabidopsis thaliana
ccacgcgtccgcaaaacccaaatcggaacttaaaccaaaagacaaacaaaaacgccgtcgtttcacgatgctttcttcttccccaaccttcttcgctactccatttctctcttcttcttcttcttcttctccgtcgttctcttctacttcaccaccgtcacgcatttcccggatctcgccgtcgctttctacaaccaccgcgtcctacacctgcgccgaagatctaccgagattacgccaaatcccgcagcgattttcagcaaccgcgtctctctacgagatccttgaaattcccgtcggctcgacgagtcaagagatcaaatcagcttaccggcgactagccaggatctgtcatcccgatgtagcgagaaatagtcgggataactcgtcggcggacgatttcatgaagatccacgcagcgtattgcacgctttcggatcccgagaaacgcgccgtttatgatcggaggactcttcttcggagtcggccgttaacggctggatacggcagttacggtggacggaattgggaaaccgatcagtgctggtagcgagttgactcgatgtgtcgagttggtccaaaaccattgaattggttgtaattagagcaaacccagagattctgggtggttgtgccacgtaggatcaacacggtttatcgtgccacgtaggatctgtcgcgttgttagcctttgtatccataattagtaagtagtctgtatttagtatttaccatctaataaagaaaataaaaatttatgta

SEQ ID NO: 956 - DNA, 762 bp, Arabidopsis thaliana
tttaaccaatcaatcaaacataaaattcgagatctgaataaaaatggaaaaatgtcgcaatattttggaaatattataagagaggaaacaaatcgttctcaacactcctctccacaaaagtttattcctcccgatcccaaccaaccccaccaaccagataagacacttaggaactgagacgttcgaattttacccaatttcttcagtttcttaagcattgagtctttctttgagctcagcagcgactgcatcgatgaactcctctgtgttcaggtacgtgtccctcgaaagctttgagccgtgaatgatgagtgcaagatctttggtcattttccctgactccactgtcccaacacaagcggcttccagcttctcagtgaaatccaagagttttgcgttgtcatctaacttagccctgtgtgcaagtccacgagtccaagcaaaaatagaggctatgctgtttgtgctggtctcaccacctttctgatgaaccctgaagtgacgggtgacagttccatgggccgcttcagcttcaatcgtctttccatctgggcagaccagaacagatgtcatcaatccaagtgacccgaatccttgtgccaagaaatcactttggacatcaccatcatagttttgcatgcccaaacatagcctccctcactcttaagagcgtaggccaccatatcatcaatgagacggtgttcataccagattccagcagcatcatacttcgacttccagctggcttcatagacttcttgg

SEQ ID NO: 957 - DNA, 762 bp, Arabidopsis thaliana
aaaccagactgagatcaacaaaaaagcaaagcaaatataaaatttaggttcaaagcataattgtatagtctccaaaatttgcaaaaacaagtcatcctgagagagataaaagtgcaacaacatggaacctagaagatgataacagtaataataaaagcaaaaggcaatcaacggtaacgacgaaggctgagagagttgtttttcttccatgtagccctgcgagatggacggttcttgtggttgttgtgaccctttccgcggagacctctgttcttctttccctctgaggtaagtcctctgagctcacggtgcttgtgaactgggttgcagatccagttgattctcgggtcattacgcacagcattgtgtgctgggtcaaccaagatgatctcgtagtacttgtaggtcgaatcctcattgagccagtaagagttgacaactctgagaccacccaatttcctgccagcacgctcctcagcaacagaacgcttgctacgctggaacttgagttgtgtcactccctggtttgttggcttaccatacacaatacccttaggcactggcctcttgcgtccaccacgtctcacacgtacacggtacacaacaaagccctgcttggccttgtaacccaaacgacgagccttatcaggacgagtaggcctgacgagacgaacaatcgaaggttgctgtctgtactcccagcacctaaccctctggaggaatctcatcacatcggactgtttcttcctccatagctcagat

SEQ ID NO: 958 - DNA, 761 bp, Arabidopsis thaliana
  misc_feature (1)...(761): n = A,T,C or G
tacataaagaaagctttcaatgaaggaatggaagatggagaagagacagctttctttgggactaaagtcagccattaccctccttgtcctcatcctgagctagtcaatggccttcgagctcatactgatgcaggaggtgtcgttttgcttttccaagacgatgaatatgatggccttcaggtcttgaaagacggcgagtggatcgatgttcagcctctacctaatgccattgttatcaacactggtgatcagattgaagttcttagcaacggaaggtacaagagtgcgtggcacagggtgttggcgagggaggaaggaaacagaaggtctatagcttccttctacaatccgtcgtacaaggcggcgatagggccagccgcggtggcggaagaggaaggaagtgagaagaagtatccaaagtttgtgtttggagattacatggatgtttatgcaaaccagaagttcatgcctaaagagcctcgttttctagctgtaaagtctctctaaatgtactatnntatttatttttacagtactatcactcttttatctacacccattatgtattttctcttaagctataaatgccaaattatatagttaaaaatttggcatctgctctccaggctttatatttttttgtttttttttgttttgccatgtgatgtatgaatctttcttgtgtgacctatgttcttagtttttgaatataaatgtgtgtgccttttaaaaaaaaaaaaaaaaaaaaaaaaaaaaaaaaa

SEQ ID NO: 959 - DNA, 761 bp, Arabidopsis thaliana
gcgtccggatgaaaatgagcagatgcgtgccatgactgaaatgaatggtcaatactgctcgacaaggcctatgcgtattggtccggctgccaataagaatgctcttccgatgcaaccagctatgtatcaaaacactcaaggagcaaatgctggagataatgatcctaataacacaacaatttttgttggaggtctggatgctaatgttacagacgatgaattaaagtcaatttttggtcaatttggtgaacttcttcatgtgaaaatacctccaggaaaacgttgtggattcgttcaatatgccaacaaggcgtctgcagagcatgcactttcggtgctgaatggaacacaattaggtggacaaagcatccgtctttcgtggggacgtagtccaaacaagcagtctgatcaagcgcaatggaacggtggtggatactatggataccctccacagccacagggcggctatggttatgcagctcaaccaccaactcaagaccctaatgcgtactatggtggttacactggctatggcaactatcagcagcaacgtcagtgaaacatcaacatcagctatttctaccaatgtcttggaacaaaagatgagcgattgtgtcttattaggacttctagattaaaagtgctctctttttgtttgagttttattttgcaaatgagtcgatcttgaatttgctatgaacaaagtgtttactgaatgttgaaactttattctgttgttttttaaaataaatatttatcca

SEQ ID NO: 960 - DNA, 761 bp, Arabidopsis thaliana
  misc_feature (1)...(761): n = A,T,C or G
gtctctcttctctctttcatatcttttagagagaggggcctctgtttttcttttgtaatctccttctaaaatcggagctttttggtttgtgctttaggcttccggtattgttgccggtttctctttccgacttgttcggatttacttccgactttgttcggttttagttgttttctttctcttttggttgtcttttgcaggttcaaattaacacttccaattttgggaagctgaaaattccggaagtcatcaaatggatccttgttcattgagtgcttgattcttctcccaagtgaaggtaattccttgctccgccgaaagggcttgttgagagcgttggttctccttggtggattgatcaagttgatgnngttgattgggacgggatatgaagaattggagtcttcgtcttgttttgatgattctctgatgaatatttcgagctaatcggctgaagnnnaaaattttcgtgatcaagtttaggtccagccaatcncttccggtggtctatggcataaggcgagttgnnncaatcgaaggcacatatagaggtttctcggagggttgagtcgatctaccggctgatgaagaaaatttccggtgatgatgagtcggtgacggcgtagctgacgaaaccttctcttctctcaacatctcacgttgcataacacgtgtcattttgttttccttatcttgttgtgttgcaattagtgggccaactttggtcttcttctgtaccgaatatttgcccacttgggctt

SEQ ID NO: 961 - DNA, 761 bp, Arabidopsis thaliana
tttttttttttttttttttttttttttttttttttttttttttttttttggtccaaaaatcaaaagagtctgtatttattagaaggtggagtgttgtttatccatacagatgaacaaaacaccagtcacacaacagttaacaatagaaattccgaccacaaaaacacaaattatagaatacacggtggtgttatttagagttctccgagcaaactcagatgtgagccttgacaacggtaacagggcatgcaacgttgttgacaacatggttgcttacacttcccataatcatcctcttaagaccaccaaggcctctgttacccatcacaaggcttgagagaggaatctgttcagctgctgcacaaatcttctcacgaggatctccccaatatatcttcatcactactgtaatcgttttcttcctagcggcagtattgacaatgtcaagggtttcagcatctggcttcaatgcatactttttcatcacagcagcgtcagagaattcactcataggaataaaaggtgatccaacggtctcccagagctgcatctcgccttcctcgtaattcatatcgtgagcaatagtgattaggatcagatgatctccatcgcgaaccacgttatcgatcgcccagctcagagccttcttactgcagtccgagaaatccaccgccactccgatccttcgtccaccactctccgccataactctctctgtaggtatacttttttctctgaaagcttgtacctcggccgcgacc

SEQ ID NO: 962 - DNA, 760 bp, Arabidopsis thaliana
  misc_feature (1)...(760): n = A,T,C or G
cgatccgcttgatgtcacaaagatctggcctgaagatatcttgcctttacaacctgttggtcgcttggtcttgaacaaaaacatcgacaacttctttaatgagaacgaacagattgcattctgtcctgctcttgtggttccaggcatccactattcagatgataagctactccagacccggatcttctcctacgctgatagtcagagacaccgtcttggaccaaactatctgcaactacctgttaatgcccctaaatgtgctcaccacaacaatcaccatgatggttttatgaacttcatgcacagggatgaggaggtcaattacttcccttcaaggttggatccagttcgccatgccgaaaaataccctacaactcctattgtctgctctggaaatcgtgagaagtgcttcatcgggaaggagaacaacttcaagcaaccaggggagagataccggtcctgggattcagacaggcaagaacgattcgtgaagcgttttgttgaagcgctttcggagcctcgtgtcacgcacgaaatccgcagcatttggatctcttactggnnncaggcagacaaatctctgggacagaaactagcaactcgtcttaacgtgaggccaaacttctgaatgatatcatctctaaagactaagtgaaatcctataaactcaatatgctcctcttacggtttggtttctaagtaatctcgtttattgacaatgaaacgcttaaagaagggtactagttcctgtttaaaaaaa

SEQ ID NO: 963 - DNA, 760 bp, Arabidopsis thaliana
  misc_feature (1)...(760): n = A,T,C or G
caaaagtcatgtttgtgcttaatcttgtgttccgggtggtcaagagggagaaaatcctcatattttgtcacaacattgcgccgatccgcctgtttcttgagctgttcgagaatgtattcaggtggaagagaggccgagagctcctgaccttgacaggggatctcgagctgtttgaaagaggcagagtaatagacaaatttgaagagccaggaggccagtcccgtgttctgctggcttcgattacagcctgtgcagnaggcatcagtctaaccgctgcttcacgggtgatcatgcttgattcagagtggaatccttctannacaaagcaagcaatcgcacgtgcattcagaccgggacagcagaaagtggtgtacgtttaccagctcttgtcgagaggaacacttgaagaagacaaatacaggaggacgacctggaaagaatgggtctccagtatgattttcagtgaagaatttgtggaggacccatctcaatggcaagctgannagattgaggacgatgttcttagagaaatcgtggaggaagncaaagtcaaatccnnccatatgnnnatgaagaacgagaaagcttcaacaggtggctgattgctgaatttttccagttcaagtttctgtttcaccatgcctttgatgatgattctttaacagcttgttgtattgtaatataaactaatcctgtatcacaagtttgtgtaatcattcagctatagcatcataatatttaataaagtgaaacagatgta

SEQ ID NO: 964 - DNA, 760 bp, Arabidopsis thaliana
attgcccatcaccagagcttaatcatatcttcttcagttactgccacgtgtcactctgaccgtgaacagcctttatctcttccaagtccacttgtgttcttgattattttgtcttcaccattctctctactcagagctcctcttctccgatcaaaaaccctcgagcttttaacaatggagaccagcatcgcgtgctactcacgtgggatccttcccccaaacgtctcttctcaacgatcctctacattggtctctcctccttccttctccacatcctccagcttcaagcgtctaaaatcgagctcaatcttcggagattcactacgactagcaccaaaatcgcaacttaaagccgcaaaggctaagagtaatggtgcttcaactgtgaccaaatgtgaaattggccaaagcttggaagagtttttggcacaagcaactcctgacaagggattgagaactttgctgatgtgtatgggagaagcattgagaacaatagcttttaaagttagaacagcttcttgcggtggaacagcttgtgttaattcctttggtgatgaacaactcgctgttgatatgcttgctgataagcttctctttgaggctttgcaatactcgcatgtgtgcaagtatgcttgctctgaagaagtacctgagcttcaagacatgggaggtccagtggaaggtgggtttagtgttgcgtttgatccattggatggatcaagcattgtggatacaaatttcactgtgggaaccatattcg

SEQ ID NO: 965 - DNA, 759 bp, Arabidopsis thaliana
gatacaacaagaggagattagacatttacataatgacccctccctttgtgttaaaaaggggctgtgttacgcatgttatacctcaccatgactccttccagtctaatctatcgagaccgtccacgattgctctgcgaaactcatcattgtgaagtataaaggaagacacgtgtccacctgtgacccatctcacttctgaaccaggccacgccttttgaagctccaacactgagtgttttggtatgtatccatcatcagttgcagcaacaaagataacagcatcagggtttttgggaatagggaagcgagtgacgtctgtgagggagagaacattccgcatccgctctctcacttcatcaagagtcattgtgatcttctgtgctgcaagttcctccctcagtgcctcccaagcagtcccatactttaatattccttcgcagaatgcaacaacagcagagtgcggagataggaatggaagtgttgcaactggtgttggatgaagcgatccaaccatcgaagcatgtactcctcccatacttagcccacaaacacccatctttccaaagccttcctcagtgtctagccagtgaataagactgcgggactcttcgattgttgccctccctagcaaaagtagatcactaacacagaggagtctcgcaccgcattgaagaaagggacgcctttggccatagaaagggctgcagtggcattatctttccaacaccattgttgcaatgttttgtttcaccaacggtc

SEQ ID NO: 966 - DNA, 759 bp, Arabidopsis thaliana
ttaaaggagaagcagaacccaataaagatagtgtcgtctccaaagcagaaccagtaaagaaaccgagaccttgcgagctctacgtgtgtaatatccctagaagctacgacattgctcagcttcttgacatgtttcagccttttggaactgtaatctctgtagaggtatcgcgaaatcctcagacgggagagagccgtggaagcgggtacgtgacaatgggttctataaactctgccaaaatcgccattgcttctcttgatggaacagaagtaggtggtcgggaaatgcgggttaggtactctgttgacatgaatccaggaacaagaagaaaccctgaagtcttgaactcaactccaaagaagattctgatgtacgaaagccaacacaaggtctatgtcggaaatctcccttggttcacacagcctgatggtttgagaaaccactttagcaagtttggcacaatcgtaagcacgagagtgttacatgatcgtaagaccgggagaaacagagtctttgcctttctttcttttacaagcggtgaagaacgtgatgcggctttatcattcaatggaacacaatatgaaggtcgcagaatcatcgtcagagaaggtatcgagaagagtgagtcgtaaaccaactgttctgcttttgctgcaaagacatctcttggacacaaacaatgtgtaatgaatgtcttctgatttcttcgacaagtaacctttacatattatatccttctcgattttgtttatcacccat

SEQ ID NO: 967 - DNA, 759 bp, Arabidopsis thaliana
  misc_feature (1)...(759): n = A,T,C or G
tttttttttttaaattgaacaacactgatcttacgaagaaaagccatgtataatatatatttatatcttnnaacaaatcatgtttgtttcttacttaccaataatttctgaaacaaagatggataaaagatgatccaactgtgaacctggcgggcggcaaaatgcagacagtcacttcctcttgctgttcccaatactgaggagctcaaggctctggagggtaatgtcacgagcggctctcgttggtgcagcttttgtggctactgaggaggacgaaggagcgaactgggtcctcagagttgtagaagaccgatcattgtttgggatgagtctgcttaatcgattctctgtgaaatcagctgaggaagtggctcgaacacttgacccagcaattgcttttcttgacgaactcaggttcctagataaagagtttggtctctcctggttttgcgtgtccttggatgcaagaacattctctgaggttcttggtctactagactgatcagcttgaacgccggttcctgagccatttcttctggtgtatgcctcgaaaacacctgagaacctctcacggctgtcctgtccaattggaggcttttccgctttgtcggcagatggtactggaatattcatagctggtcttaaagttggctaatggaacaggaaaagcgtgagaaggttgatacactattcaaaatgataagaattctgcacatacagctagcttcagaatggacttactcttggtttggaattcga

SEQ ID NO: 968 - DNA, 759 bp, Arabidopsis thaliana
gatctttccttcttatgttttgtctctttgtaatcccatctctctcatctgattctgatcctttacaagacttctgcgttggcgatctcaaagcttctgcttccatcaatggctttccatgcaaatcagccgtttctgcttctgacttcttctactccggtttaggtggccccttagacacgtcaaaccctaacggagtaaccgttgctcccgccaacgtcttaaccttcccgggtctaaacactttaggaatctcgatgaataacgttgagctagctccaggaggtgtaaatccgcctcacttgcacccgcgtgcaaccgaagtaggaactgtgatcgaaggctcggtgtttgtcggattcttgagtaccaacaacactttgttctcaaaagttttgaatgcaggagaggcgtttgttatccctagaggattggttcatttccaatggaacgttggccaagtgaaagcgcgaatgataaccgcttttaacagccagctcccaggagcagttgttttgcctagtactctgttcggctcgaaacctgagattccaaacgcagtcctgaccagagcgtttaggactgatgatacaactgtgcagaatctcaagtccaagtttgctgtttgaatctttttatttatgttttctaaaataatctttcacaataagctttatagcaatattggtatacacttgtctctgtaataatcggtatgaatattcgaaacaaaacaataataagattgatctctttctc

SEQ ID NO: 969 - DNA, 759 bp, Arabidopsis thaliana
ttttttttttttaatacagctctgcaagaacttcaaatctaaggaaaacacaagtcaatgtctaaagcctatggcggctttgtttctcctcataggaagaggatcaatatgtagaaaaattttggagtgaaaatccaagaggaagatccaataagtaagtaaggaaagaattatggtttttcacgggtgtttagagatgatcacagatggcttttgtgaaatctgttgtagttgaggaacctccgagatcagcagttctatactttccctcggctattgtgttgatgatggcactgtggatttgctctgcttgtttgttgagcttcaggtgccgcaacatcatcactccactcagtagcaaagctgttgggttcgccaggttcattccagcaatatcaggtgcagagccgtgaacagcttcagcaagggcaataccatcctccccaatattcatactaggagtcagtcctagtcccccaacaagtccagcacacaaatcgctgataatatctccatagagatttggcatcaccaagacatcaaaaagtgctgggtttttcacaagcatcatacagcaattgtcaataacaaccttctcgtaatatatctcaggatacttcgcagcaacttcatcacaacactgcaggaaaagaccatcagttttctgcataatgttggctttgtgaattgcagaaactttcttccttccgtgagtcttggcataaagaaaggcatactcggcaactctcatactcgcct

SEQ ID NO: 970 - DNA, 759 bp, Arabidopsis thaliana
aaagaatacaagtttggtatcaaacatatacagagtaaaacgcatagatatatatgatatctcacaagaacaaaacagcaacccaaaaaaagaaaagaaagacaatgcttgtggtaaagtaacccaccccgtgtttgtatctagtaaagccaaatgaaatccttagtagtttggttatggctgacttgtgtttagcttctaatcttctggtctcacacccaaatccttcttacctcattcattttttttggcagcagcgacagaatcacacaagtctagctttctcaaggtttccatggtgctggtggaggtggtggagtagggaacaaaggaggaacagctgagaaaatagtgtttttgtctatcttaccggtggcttcttcttcacccgataatgccacaagagctgcgactagaccagcattgcctgcaagagtcggttcagtgtagttgtagttcatacggacatcacggtacccgtcgcgcttgtcaggaccagcaaccatggctccttcaatcgtgtttgggtttggtttcttgctgtctctccatttccatcctcctttgcagttatacttgactttgttcttgggtatcgaagctcctctgtgatgcacatgtcttgggtattttgtgccaaaaccaacgacataactcattttccgagggtttttacccagtatataatcaatctgggatctagcaaagtcacgtagcacacttgtcgaatagaaattaggtccacagtacctcggccgc

SEQ ID NO: 971 - DNA, 759 bp, Arabidopsis thaliana
  misc_feature (1)...(759): n = A,T,C or G
ttccaagaactcagcctctattgctcttttcttcgcccttaacatcatattcttcaccttaaccgctgcaacagattgtggttgcaacccaagtcctaagcacaagcctgtcccaagtcctaaacccaagccggtcccaagtcccaaacccaagccggtcccaagtccttcagtaccaagtccttcggtcccaagtcctaaccctaggccggtcacgcctccgagaacccctggctcatctggaaactgtcctatcgatgctctcagactcggtgtatgtgcgaacgttttaagcagtctactcaacattcaattgggtcagccatcagctcaaccatgttgctcgctcatccaaggtttggttgacctcgacgctgccatttgtctttgcactgcgcttagggctaacgttcttggtatcaaccttaacgtcccgatatctctcagtgttcttctcaacgtttgtaacagaaaggttccgtctggcttccaatgtgcttgaaggatatcagctatgcatacgatgtgatgcccgtgcacaaatatcttcttcgaaattgttacagtatgaataaatgcatgtaagctatagagtttatgttttaaattttgaatttgttaaagtgaaataaccaatgtgtgagagtgagactttcttagttttttttttccgtcaacgttcctgtattccggtcttgtntgcttttgtagcaatctattactattttcaacccgtttaataaaagagattttgtacct

SEQ ID NO: 972 - DNA, 759 bp, Arabidopsis thaliana
  misc_feature (1)...(759): n = A,T,C or G
ctagggagattgaataatctctgtacattgaatcgacaatacggtttatctgggaagaactcaaacgaggcaatgtttgtgatcgaagcttatcgaacacttcgtgatcgtggtccttacccagcagatcaagttcttagaggtcttgagggaagcttcgctttcgttgtctacgatactcaaacttcctctgttttctcagctctgagttctgatggaggagagagtctttactggggaatttctggagacggatctgttgtaatgtctgatgatattcagatcataaagcaaggctgtgctaaatcgtttgctcctttccctaatggtaaaccaaaacttaagtttttcattagccctataaagaaagaaacatacttttgagtttagatcttgatgtgnnnnnnntgtttttgttatnnnnnnatgtatgtatcatagtgagacagggcttaagagctttgaccatccgactaatatgatgaaggcaatgccgaggattgatagtgaaggtgttctttgtggagctagtttcaaagttgatgcttgttctaagatcaatagtatccctagaagaggaagtgaagctaactgggcgctggctaattctcgttgattttgcttctagtttcgttaactcttgcttctttgttgcgttttctttttatgtactcttgtttatgtaaatatagccttatgaagacgataaagaaataaaattgatttgcttcaaaaaaaaaaaaaaaaaaaaaaaaaaaa

SEQ ID NO: 973 - DNA, 758 bp, Arabidopsis thaliana
ccacgcgtccgagcttcatgcttcatcaaatccggaaaatgattggacttgctgttgctatcatgaggaactatgctcctgaatcactgatcgaagcttctttcaagaaggatgtgagaataaatgtaccgatggcgccagaagttggattataccttgatgaatgcttcttcacgtcttacaacaaaaggtttaaaggcagtcatgaggaggtgtcaatggaagagtacaaggaagtagctgaagagttcaaatggaagtatgtttattcacatattggctctgctgaagaaaaagatggagctgtggcgatttggttgcattctctgaaccagagaaactatcctgatctacgaagcaatgaataccaaccggatgaagtcattgtctataagaagattggtgaagcctctgaagaaaatatccatgaaggcaatgctgagctattcgttgtcgataaggtgaatgatgaaacctctgaaggaacgactatggaagagaggaccacactagaggagaaggcaacagggtgaagccgcttttatctactgcggatcacaggattaaggtggaagcatcaagcttcacccgcaggtccaaactggactagtgagccagatgagtaccatttggacatttgtttcagtgtgtccttttgagttttgtctctcatgacaaaattttggaaactcaagtaatgaatgtgttaccattgtgacattttgatcttattataatgttatcgaataagtattggc

SEQ ID NO: 974 - DNA, 758 bp, Arabidopsis thaliana
gagggagactttatccttattctgccgtccagcatgattgctggttttccgttgccgtgttcttgtcgtccggtttcatgccgacttatgtaccaaatctccggtaagttaaatcttttatcggtgaactttgtgccatggcttatgtgccatgtttcttttggtttgaatagtttccatgataaaggagatgatgttgtcgatttgatagcttcttctcgtttagttgtggattctctttatgtttttgttgaataaacggtttacaacaacaaatcaatgatggttacgactaagaagttgaaaagaagattggatccttgcaaatttggattgcctgtagctgttattacaagaaattggagctttgattagagcaaatttatgtggatcaatcagattttcatcctttgattacccgattttcgccaaatttcattgttgatgatttggcaaacggatgaggttgaagattctgttatttgtatcccttctaagctgattttgcagttttcggtgagaaaaaacgaaaatcgacgatcacaaaaaaaaattctgacgtcgatggaggtcaccggaatcgaagacgttgacggcaaaggatgatggggaaagttacgcagctctcatgcaacacgtgtctttgttatctatttgctggatattgtgtttgcttgagtatatccttctttttcttagaattgtaatcgtatgggctttatgggcctttttgggattgtaaaccttgaatattaata

SEQ ID NO: 975 - DNA, 758 bp, Arabidopsis thaliana
ttttaagataatgtttattcataaataatacacagaaatgttttcaataggatgtgaagtaaataaaaagcagaataagcagagcaaatctttgacttatcctaagacattgcttgatagagaacacaaactttgaatcttgcaagaaacacaaatttgagtgacattcaagattttttcttgatctgatgatcatcaaggattccagaggattgtagtctctgcaatcatggaagtgacaatgtaaggatccatgttcgaagctggcctcctgtcctcaaagtatcctttcccttctttctccgtatcacgtcctactcggatcgatgctccacggttcgcaacaccccaaaggaaagtgttgatgtcagcagtctcgtggtgtcctgtgagacgacgctcattgccttcaccgtaagcagcaatgtgttctttgtgtctcagtcccaatttatcgattgctttcttgatgatctcgtaaccgccttcttccctcattgacttggtactgtagttgcagtgagcaccagcaccgttccagtcaccgggaatcggtttcgggtcaaaagataccactacaccagcaatctctgtgatcctctccaaaatgtaacgagcgacccaaatttcatcagcagccgagataccaacagctggaccgacctggaactcccactgacccggcatgacttctccattgatgccactaatgttgatcccagcgtataagcaggccttgtagtgagaatcgcggccgc

SEQ ID NO: 976 - DNA, 757 bp, Arabidopsis thaliana
  misc_feature (1)...(757): n = A,T,C or G
gatttcaaatttcacaatctggatttcgtgtttcgaatcactttgaagaaaaagtttctcaatttcgcctgaaaacccacgtgggattggaactaaacactagactgacaagaagaagaagagtaatcatcatcgagtgtttattacgattatgtccttaacgaaatcttcagaatcagttttcactgaagaagaagaagaagattcctttagcggtcgatacacgttatggatcaaagaagcattagaggagcttccacacaatttcacaatcaccgacccgtttatttcgggtcacccgattgttttcgcgagcttagggtttttgaaaatgactggctattcacgagaagaagtgatcggaagaaatgggaaagtttttcaaggacctaagactaatcgaagatcgatcatggagattcgtgaagcgattcgtgaagagagatcagtgcaagtgagcttgttgaattatcgtaaannngggtctccgttttggatgttgtttcatatgtgtcctgtttttgggaaagatgatggtaaagtcaccaattttgtggcggttcaggtcccgatttcgggacgagaacatcatcggaagaagttgagaaatgtcagagatttgtcgtcggatacttctccgacatttggttcttgtcgaagagaggtttgttttggtaatttcgtgtgtcaggatcgagctttaccagtggaatgtgatgatgatgaacaaggattagaggattgggaacagtgtgaa

SEQ ID NO: 977 - DNA, 757 bp, Arabidopsis thaliana
  misc_feature (1)...(757): n = A,T,C or G
ctcgagcggccgcccgggcaggtacacaccaaccttttcaaacccagcttgatctaggatggcacgaacattttcggacatgaaatcaacaccnnnctgttataaactgacatccagctttagccatcgtgacagctgagtctgccatgacaagagaatcagatatagagatatgtggccaatgcttttgagcagcagtcaagaccccttgcacttctggatccatatagaaatgagcaaccactcctatcttcttttccttcaacacattgacaagttcttcaacccgtgactcctccggaaacaaatatttcgcctgagcttgagcaaagcttcctttagcttcaatgccatgagccgttaacacaagtgaaggaaatggctcaaaggaaggaactttaccttccctctccgctactaatcgtcgagtcttcttctgcatactcacaagaacattataccaagtgttaactctcgatctctctccacccaacaaaccaacattaagctcagctaaatcctcagtcttcaactccataacttctacaggagaagcctcatcaagaacttgaatcaaacaagaacacatccctttcgacacatctgaatcactatctgcacaaaacctcatcttcccatcttgacctaactcagcatctagccaaacacgagctgtgcagcccataactctgtttgattcagtcttggacgactcgggcatttgaggaaggagactagcgtaatggagaacccattt

SEQ ID NO: 978 - DNA, 757 bp, Arabidopsis thaliana
  misc_feature (1)...(757): n = A,T,C or G
tttttttttttttttaataaaaagcttttgggatgatttcattaatggcgatggttagatcacgtacacccttctattataatctctcgctcttttttacattagaaaaaaaaaacgaagattctttttttttttaatcgtatattcgaagattcttcacgttattgccagtgattgccgttgtgaacaaggtagatatttctggaattacggtgaacataacaaccataacacggattcttcgtaaccgtcgttattctcggtggagacggaggtagcggtggttttgatagagacggagatctaggacttgatgaagtagaggaagttgtggaagatgatgacgtggtggttgatgacggtaacgctaacggaggaggagattttttagatccggcggcggattttggtggatttaagaagactctgattttcatcggagatgaagaggaaacgagatcgtactcttcgattagattcactagatcttcatcggaagtaattgaaacgagcgcgtcgagatcttccgtcggaagctgacatcggatcgttacggttatagatccgccgacgccgccgcacatctccgccatnntcgacgctaactcggaaaatgagacggagcgaggaacggcgaggacgcgagtgtgaccaccgttgtaacggagtttaccgtcgggataacgaggtaggattttgccgccatagctacagagaaatttgattgttgagttcgtcggagatgtaaccatatctg

SEQ ID NO: 979 - DNA, 757 bp, Arabidopsis thaliana
  misc_feature (1)...(757): n = A,T,C or G
tattcaatactggtcaatggtgggtgcctgggaagcttttcgaaacgggatgttactttcaggttggaaattcactgaggctcggaatgtcaattcctgcagcgtatagagtagcattagagacatgggcatcatggatagagagtacagttgatccaaacaaaactcgggttttgtttcgtacatttgagccatcgcattggagtgatcatagatcatgcaatgtgacaaagtatccagccccagacactgaaggaagagacaaaagcatattctctgaaatgatcaaagaagtagttaagaacatgacgattccggtatcaatattggatgtaacttcgatgtcagcgtttagaagcgatggtcatgtcggtttatggagcgataatcctttggtacctgattgtagtcattggtgtctacctggagtacctgatatctggaatgagatcttgctcttcttcctctttagacaaccagttcagtgaagtggataattgcaacatagaaaaaaagattaacgacccttgaagactgaatctctcggagctaattgttcatgtttcttctgagagctaaagacagataanngggtcacaaatttttggtgaaagttaaaaatgattcttacttaattcattcttttattgtttcttctacgtccttcttctttttatttgtaatgtcacggcttgataactattcaacacgtaatgtcacggcttgatttatctgcaactgaattcaagacattttc

SEQ ID NO: 980 - DNA, 757 bp, Arabidopsis thaliana
  misc_feature (1)...(757): n = A,T,C or G
aattgaaacttcctctctctcttctctctctaaaaaatctttcagagaagaggggaagctttgtcttttgtttcgccggttggatatcattccaacgcttatctgtcccgatttagtcgggtcttatgtctagcatctctggcttttttagtagtgttggctggctcttgcccggcagcgttgtttccatgagcgtcgttggccggatttggtttgtatccaacgttgttttgtttttctttcaataatctcatagatcttatgttggtgataatggtttaggtgatttttcgcttaaagatctttattatccaattcgatcttttgagtttgagatttgcaggaatcaatttagagatttgcatcttaagttgaagaaaagaagaagttttcgttgcatattaatattgcccttagctgctaagtttttatctggaagtnngattggtttgtttaaggtgaaacccagaagaatcaaacttgctttcattatcaatgttgatttttctcaccggaatcaatctcagacggcaaaggaagatgtcggaaatgcttttagattactcatccaaacgtgtgctgtgttgttttcagctgttgacacgtaagattggttggagccacaatatcagttcttcatctttaagcaatgttcttggactcatttaggacttcaaatgttcttgtaatctcagtgtatgttgggcttttggttttttagcccatgtatggttggttaacgttaataagattttcc

SEQ ID NO: 981 - DNA, 757 bp, Arabidopsis thaliana
  misc_feature (1)...(757): n = A,T,C or G
tctctcttgctacggctaacagacctgtcgctgcttctcttttcggagaactacacaggtgtctcaaattggtgtcaatcttcaaaagcgtggtgtttggacaagtagtaataggtcctcctggatcgggcaagaccacttactgcaatggcatgtctcagtgtcagtgcatctctctaatgggcaggagatcctgcaaatnntgcattaccgtatccatttttaagccaactcttacaaaatggtaaaaagaaatcaggaacttgcggctacttgtgccactgcggttaagtcaagtaagcatgtagatggaagaatagtgaccagccgttgagtcaagagtgcagacaggtagatccttgcgctctcttggtcaactgcagctacttactatcttggatccttgccctccaaaactgctctgctaaaacgttggtagctctctgggaagatgaggaactaaagtcattggctcctctggctccctcagctatacatggaagaccatgaatgaatctagaggagagaagctcagcaacggtcaacagagcataacaaatgcgtatggcttcagtgacgatcccgggccatttcttagatttctgagagagacagagtggctgaatgagaatgatcatagacattgtttctctcttggtatcaagagaggagatggtgaaagtaatctgaatgtttcttggatcacaagattcaagtactctacgttatgtagatcttcttctgtgattcgcggccg

SEQ ID NO: 982 - DNA, 756 bp, Arabidopsis thaliana
  misc_feature (1)...(756): n = A,T,C or G
tattacaaagtgctaaactttttttcacagaaagctaataattaagcttatcaatcaatcaattaagctttttgtagacaaaactgctaacatgaacccaagatcaaatagttgacaaatgataaagaagcttttgctacattacatgaaatgacatgagatgattttgcttgtgacaaacaagtctctatcaaacattttttctttcggttggttcactagtctcttcacaatctctttctttgtcttgtttcaatagggtttcaatagggtttcaatagggtcccttgacttgtttactatgtctgaatcattcattcatcaggngaaatccaaaaatggaagtcccaaacgaaactattcatttaacactctactttcttcttgtatccaaatttaccctttgatgtagtttaatagcctaataaggtaatacatgatcaagaacaggagcacaaaataagctatgagtttgcaactttttcgattagacttcttctcaaagaccaacttgaagcggttgatcgttcccgacattatccccctcgcggagtccattttgttccccactttgtcaagcaagcggttatgattcttaacttcttcatgtatgtctccagtcactctcttgagaaacgaaactctgtcctgaagattttccaaagcttcatcattatcacgttcgtcatgagcatacgaagaagaagctctcaagcgaccttcttcaagtccatcaaggccatcaaagagagacgt

SEQ ID NO: 983 - DNA, 756 bp, Arabidopsis thaliana
  misc_feature (1)...(756): n = A,T,C or G
cccctactgctgttactgccaacggaaatgctggagcagctgttgtcaaggctgactcaaagcccaaggccaagcctgccgaagtgaagcctgcagaagagaagccggaatcagacgaggaagatgagtctgatgatgaagatgagtctgaagaggatgatgactctgagaaaggaatggatgttgatgaagatgactcagatgatgacgaggaggaggattctgaggatgaagaagaggaggagactcctaagaagcctgagccaatcaacaagaagaggccaaatgaatctgtatccaaaacacccgtctctggaaagaaggcaaaaccagcagcagcaccagcttctactcctcagaagacagaagagaagaagaaaggaggacacacagcgacaccacacccagctaagaagggtggaaagtctcctgtgaatgctaaccagagccccaagtctggaggtcaatcatccggtggtaacaacaacaagaagccattcaactcaggcaaacaatttggtggttccaacaagggttctaacaagggcaagggcaagggtagagcttaaggacgtggatcaaggagaggttttgggttttcgagtagatgatgaaaacacttggaagtgtggttttggattnntatcttatnntattagtataactttgttatcggatgagctattttgagtatttgcagtttctactttcctatgtaattcagtatatgaatatttgctgaaatgagaaagaaga

SEQ ID NO: 984 - DNA, 756 bp, Arabidopsis thaliana
agaactgtagaagatacagtctatatatataaaccataaaacacaatattccgtataataatgaatccataacataaaagttaaattcttattaattcatagaatcataatacaaaccaatacaacaatacccccaatggtaagagtatatataataggaaataatgaaactgtaaacttcaggaatcttacggatcaccccaatgaacaccagagcaagcagagtagaagaaaccacagatcaagatatataaagacacaatataagagtatagagaatcaccctgtctctttaaaacaagaagataaattaatacacacataagtgtatttaaattatatatcaatatggtttttagcattggaagccaggaggaagttgtttgctgcaaacattaaggagtagacttaaagatattgggaggttcaagttgattccaagaatgttagccttaagagcggtgcagagacaaacggctgcctcaacatcagcgagtccttggatgaggctgcagcatggctcgaccggtggcttgccaagggtcaagtccaggaggccgttgagcacattagcgcagacaccgagcttgagggtgtctttagggcacttgctcgagccagagctagggcttggggttggtttaggagttggctttggcttgggagaggggcaacctccgccgcacggagtacagctaccacaggcggagattgttgtgaaaaagagaagattgagagccaagaaaagagctatgg

SEQ ID NO: 985 - DNA, 755 bp, Arabidopsis thaliana
  misc_feature (1)...(755): n = A,T,C or G
tggaattgtctctgaccaagactactattcatttgtaaagcttccagaaacatgtaagcgaaagaacaaggaagaagaagcagttactggtcatgctgttagtggaacgagtaaaacccctgaaagatttcgtgagacatacaagagaagacggttcaagaactcatcaaaaaaggcaacaaacaagaatggtgaaactcttatggaaagagaaaaaacagataagcctatacctttttcaagcgatgcagaaccgtcggttgtaactactggaacagccagtaaagaaactctaggatcatctgttggtgttgttgacattggtgtcaacaaggttgcttacttttttcaggttgctttgcccggtgtccgcaaagattacggtgaattcaactgtgagattgaatcagatggaaaggttatactggagggatcaactacaacaggcgaaaaaaatatcaagagacattctcgggtgttcgagatgaatatccggaagctgtgtccgcctggacctttcaaactgtgctttaanctcccgggaccagttgatccgcggctattctctcctaacttccgatcagatggtatcttcgagggagtcatcatccgacacaaaaactcttaattaaaccggaggttcctatacaagtttnnnacttaggancnatgtagatcttttatctttatgttnnnggacatagaaggaaagcgaatcaaacagcatgcaaggataaatcttttacttttaggac

SEQ ID NO: 986 - DNA, 755 bp, Arabidopsis thaliana
tttttttttttttttaacaggaaaggccgagtactattttcatggaaaagtctgttacgcaagaaaacgaaatttcagagtccagtgacaccattctgttcttgtagcatttgggacgtgtttagattacaactaactcgtaagagtaactttaaaatgctattcttagagaggaagttctccactgtctgcaattacgactttgctcttaggagttccgctttgtttgccctcagcttcaatcttataaactacatccattccttgcaccactttcccaaacaccacatgccttccatctaaccagcttgttgtcaccgttgtgataaaaaactgcgaaccatttgtgtcttctcccgagttcgccattgaaagtacacctggtccagtgtgcttcagcttgaagttctcatcagcaaacttctgaccatagattgattctccacccataccgttcccatgcgtgaagtcacctccctggatcataaagctgggaatgattcgatggaacttgcttcccttgtagtgtagaggtttcccactcttccctacacctttctcccctgtgcacaaagctctgaagttttctgcagttttaggaactgccttgccaaatagtcctataacaacgcgaccagcggatttgccgtcgatctctacatcgaagtaaaccttgtgagtaacctccttgagatcttcttttgcctgaattgaagctatggctccgaagaggaagagagttccgagtagaataa

SEQ ID NO: 987 - DNA, 755 bp, Arabidopsis thaliana
ataaacgctaaaactctcatatccaatcgcaaaagagaatgaagaagaagctccagcgtctaaagagtacggattttataactgtggccaaatcatcctccaattgtgctatccgggatggtggtcgacggcggctctagggcgaaggaaaaaaaaaattccaaaaattaattccaaaaagactcttgagagtcttgattccccattttccatcttcactgtatttgatgaggattttttttccctttttagtttttttttttacttgttgcagaggcatttttgactctcttttttttttccaaagacaattaaatcatttaaagggttttgcctctgatgtctgatgtctctctgtctcatcaagttactgttttttttattctgagtgaaattttacatttttcacaggtgattggaaccaagacaaagatctgtatagttatggaatacgtttcaggtggtcagctttcagacagacttggaagacagaaaatgaaagaatcagatgctagaaaacttttccaacaattgattgatgctgttgattattgtcataacagaggagtttatcatagagatcttaagccacaaaacttgttactagattcaaagggtaatctcaaagtttctgactttggattaagtgcagttcctaaagtaacaatttctaattttctagtcacacaaagcaaaatatttgggtttgtaacaatcaaaggatgctaaataagacttttggtttatgtaaaaaa

SEQ ID NO: 988 - DNA, 755 bp, Arabidopsis thaliana
ccacgcgtccgaagaagatctgcttctgcaaaaaaccttatcctgctatggcttccactttcgtctgctctctaccaaatcctttctttgcttttccggtcaaagcaactactccttcgacggctaaccatacgcttctcggaagtcgaagaggttgtcttagaatcaaagcgatttccactaaatgggaaccgacaaaggtactgtcttttccgaaaaatgtattggtttctctgtttttaaaaactggtgattaatcttagtgttgaggtgataattgcaggttgttcctcaggcagacagagttcttgttcgtcttgaagatcttcctattgtcagtttagctcctttattgtctgaaatgtcatgattattatcaataagctattaatttgatgaatcactaaattgaattccattgccaaaaacttatgggctcttaaattgttattctgaagaaatcctcaggtggagtattgttgcctaaagcagctgtgaagtttgagagatacctaacaggagagattatatctgttggttctgaggttggacaacaagttggacctggaaagagggttttgttctctgatgtgagcgcttatgaggtcgatttgggaaccgatgctaggcattgcttctgtaaagagagtgacttgttggccttcgttgagtgaagtcttgtccaagagggagagatttgaagattttacaagttttctgtaattttcagacagcaattgttgtttctagttaat

SEQ ID NO: 989 - DNA, 755 bp, Arabidopsis thaliana
gccgcccgggcaggtcagaatcaactagttttgtttttcctctttcaaaaatgcatttctcttcgtcttcaacatcgtccacttggacaatcttaatcacattgggatgtcttatgcttcatgcatctttgtccgctgctcaactcacccctaccttctacgataggtcatgtcctaatgtcactaacatcgtacgagaaaccattgtaaatgagttaaggtcggaccctcgtatcgctgcgagcatccttcgtcttcacttccacgactgctttgttaatggttgtgacgcatccatcttgttagacaacacgacatcatttcgaacagagaaagatgcgtttggaaacgcaaattcggctcggggatttcctgtgattgatagaatgaaagctgcggtggagagggcatgcccaagaaccgtttcatgcgcagatatgctcaccattgcagctcaacaatctgtcactttggcaggaggtccttcttggagggttcctttgggaaggagagacagtttacaagcattcctggaactcgctaatgcaaatcttccagctccattctttacacttccacaacttaaagccagcttcagaaatgttggtctcgatcgtccttctgatctcgttgctctctccggtggtcacacatttggtaaaaatcaatgtcagtttattcttgacagattatacaatttcagcaacacaggtttacccgaccctaccctcaatactacttacctccaaactctt

SEQ ID NO: 990 - DNA, 755 bp, Arabidopsis thaliana
  misc_feature (1)...(755): n = A,T,C or G
ctactggcaaaagcaccagttactgcatattatgttgtatttggaaactaaacacttgttttcatgtatgtgttgtgtttaatcatcagggaatccaaggaacctgtcgataatgcgagcaacaggagttccatcacctgnnagtatactgaaccagagaccccaactccattttcgtcaaggtttgatgaagggagtgnnnacgagtgtagtacaagtgcttcctctcttcaagtgctnnngctaattcacattgatgattgtccatnngatcttcgttcactaccacaatcaatggtttccctagtttcagtgtctcaaatatacttccagatccagcgtgactaataacaagagatgcagatcgaatataatcagcgatacttgaggaaaatgtgaagtaatccacaactaatgatccatccgctccatcacacttagttgggaaaaagattcctcgacccatttgaataagaagatgagtaaatcctctcttctgcagttcgtctttaacattttgactaaccactgctttcacaagagcatcgaaactcgttgttcctacagttacaaacactactctctttgcattctctctatcctcctccatttttaaacttctcgattcccaattccaaatctaccaaatcagactgaggatacaaaagcaccgatcgatcttaagaggcagatccaagaatcttgctttgggatgaatcgagagagagaacaacaagtgttttccgatctacaga

SEQ ID NO: 991 - DNA, 755 bp, Arabidopsis thaliana
actctttaatgattgggtattgttcactgaaacaaacagaacatgaaacaagattacttggaagacatttttagaacaaaaaagaaaagagatttattggcatctccattctctatttacaatttctggttttgaatctgaataatttcaagttcttgtccaaggaatataaccccaccaagcgcctgccaacacccgagatctctagttcatggcaatccaaacgtgaacatggtttttgccttcaatatggtaggctatactattattgctggaccttcctgaattctctaagaactgggtagatattctcaaatgcggtataagtctcttctctcatcttggctccagttataacaatctttcctgacacaaaaataagcagtacaatctttggtagtttcatcctatatatcaatcctggaaatagctcaggctcgtaacttgagaaagcactgtgagagtatgcaagaccttcaagcctaatggggaatttgacatcacatgagcctacaatgttctgaatcttaaaatccttgaactttgcaggaaatccaagcttctgaacaatccgagcatactttcttgcagccagctttgaaagatgttcacttttagctccggtacacaccattttcccagaagcaaaaattaacgctgtggtctttggctctctgatcctcatgattacagcagcgaaacgcttggggttatattcagcattcctagcttgcaaagctatggctttaagatca

SEQ ID NO: 992 - DNA, 754 bp, Arabidopsis thaliana
tgttcttcaacttttctcgaattaattcagattcagaaacaaatcttaaacataagagtttttcaaagaatattaaacaatcaaatctaatttctgtatatcatcaaaaggaagtgaaagcttctgaatgtagtagagagcaacaatgttcatcataccaccagagtaagtcctaatgcctgtttatatcaaatcttctgtaccgtttttcgcacttcttgttccgagctattggtttcttgttcacgattatgattcagtgagcactaattccttatcgcaaactggacacgcctcgcttctttccatccatgcaagaatgcaagcgagatgaaagtcatggccacatttagtgagcaatttcgggttatcaatctcatattcttctaagcaaattggacattcatcgattgcttctcgatactgtttctttagctcaaaatcagttagatcatcaacatgccatgttttcttctctggaacaacttgtgtgagtcccggggatgcttcactcgaattgccctgagttcttggcaatttcggtggactagtttgaagatttatattcgtgatggctaaaggaataggcggcgaaagaggtgaactgtatgcattagagagagaggaaggcgtggcacgagataagggaagatgctcatctatagttcttgagctttcgggtatactcgggagacaacagcagcaacccattctttggtatgataaagttttgacagttctcagatcagtgtat

SEQ ID NO: 993 - DNA, 754 bp, Arabidopsis thaliana
  misc_feature (1)...(754): n = A,T,C or G
ttttcagacaaacacaatttatttgactttaaaccatcaaagtatcctaaaggaccaacaaatctaaacaaaaactaaacttatcttggaaaaaagcaaataaagccacacaaataaaattcccaagtctcagagaacagagtcatagccattgatctaatgtacaacacccaaaagaagagaagattgattgtttgggctaagaaaacagaaagagcgtaaccaaccccgtagtagagagtttcagataaccttcttcttctcgaaaaacgtcttcaagtgcaaaaactgcatccctgcaactcctatgcagacgaaaaacgagagaacactcaaccacgccatttttgtgttagtggaccggttcaagtcttgcatctcttcttccctatctctaagataatacatctcttcatgaatcgagttaacagtatcaagaagactctttacttcaaattccataacttcgacttgactcttcttagcaacattagcccagcttttagattgaacaccagtcttccactcaaagtcaatactcaacgaaacctcaggcttatgatcaacagcagtgaaacaagccatgtaatcacctgcttcaacagccgagaatgcgaattgtcctgaannnacttgttccgcgtgatggtaattgtnancngaattagacgtcacnnnnacggaaattttgtgagtttgtggtaaagcttgaccttcgtgaggattatcgatgttgtatttaccaacagtcatt

SEQ ID NO: 994 - DNA, 753 bp, Arabidopsis thaliana
tctggtgaagcaagtagttagtgaccccaaaactaaagcagcttgtccagtaccatttgatgaagcaaagctctggaaaggccaacgtggaccagaactgaagcaacaattagaaaaacaattcagaaacataagtgcaataatggactgtgtaggctgtgagaaatgccgtctatggggaaagcttcagattctcggtctcggtactgcattgaaaattctattcactgtcaatggtgaagacaatttgcgtcataatctcgaattgcaaaggaacgaagtgattgcgctgatgaatcttctccaccgattatctgaatccgtgaagtatgttcatgacatgagtcctgcggccgagagaatcgcaggtggacatgcctcttcagggaacagcttttggcaaagaatagtgacatctatagcgcaatcaaaagctgtatctgggaagagaagctagatgttcaatgaggtctgggggttgtgggatcaagcgcagtgatggcgggagagtatactttgttgtaaagtaaagagaggttaattttgcaggaaacagttatacaaagccccgttagatgccaacccgaagctgagaactttttgatttaccctttaacgtgaatttagagaatcttacatgaaactaaaaatattgtacggattttgaaatttgttgacagtcccttctgaagtaaacatagaatgggtggaaaaacgtgaatgaagagagacatttttaaaaaaaaaaaaaaa

SEQ ID NO: 995 - DNA, 753 bp, Arabidopsis thaliana
gcggccgcgcaagtcgcaagatcattttgccggatttttactttatttttgacaactcaaccacacaccaatcaaagcctttatatatgtttggttatgaagaattgtgagaaatatttgggcaggatggcttcttggtgtcgaaaatgtatttacttgaagcctaagttggagaaattagcggcagaatataataaccggtaagctaacaaaagaatcaacaatttacatggatgttattgcaaaggttgattatattgtgaacaaaaatgatttttcttacaacagagcaaagttttactatgtggatgtaaacaaggtccctcaaaccttggtgaaacgtggaaacatttcggtaaaatgcttaaacataattttgtccttcttttctgatgtggtatgtgccaaatctgaaccaattacttccatattcgtgtgttatgcagaaaatgcctactattcaggtatgcttactttcatctaatacaacatcagtattttgagtttcttgatacgcatttgacaataaagtaatagtgaaaaagtaaattaacataataatgagaaaaatgagtggtgaatgcagttatggaaggaagatgagatgaaagaggaggtgattggaggtcacaaaggatggcttgtcatcgaagaagttagagaattgatcaacaaatttgtctagttctctcttttttttcatttcctaccttttttttttcttttaaaaaaaattaatatgtacagtcagtt

SEQ ID NO: 996 - DNA, 753 bp, Arabidopsis thaliana
gtacaagagcttttttagcaagttaaaaatcaattcttcttaagagcattcccaatagctaatacagagatgagaaaaaaaaaaaaaaaatctagactgtatctagagagtttcactttcaaaaaataaaattaagaaaaaaaccatgtcgagattctgacaaaacgatgaacaaaaactatatttatgatcttcttcttcttcatctgggcttttttatccccaattttcttctcattgtgtttttggcttctcgatcttgacataagggagaactcccagaaagtattttacctttgggttccatccacgttgctgagctctgcagaacatcaagaatgtgtttgcgcagtaagagttgaaactcatgaacacatgccacagagcatgtccctgaggattcacaggccactgagatatcgtcttgcagaagacacggtcacagaaccagcatatgcttcccactaagatcgtagcaacataccatttcgcaatccttttggctgctgtgtcctctgtgtgaatgtagtacttgtacatccgagggatgcatagaaggcaaagtatcacgtagtggaccttgaaaccaattccaaacctgaggtaagcatggactatggcaaaggcagcaccgtagaggaagagaaaagtgggcattgtacttcggtaatgccaatctggtgagtaaaggatgtacatgtatagaagtatctcccacaccattggggtctcatcactctgttgttgcacgtg

SEQ ID NO: 997 - DNA, 752 bp, Arabidopsis thaliana
ctttttttttttttttttttttttgagggaattggcctttgctattgctatgaaacacctctgtcttggacaggggcttacagactcatggtcacagttgttatcaacgaataataagcctccacgtgtaacttaacctaaaggtccctagttcagtaaacatggaaagtgaacaagcgagcgacaacatcggcgccgcaaaaaaagtggaatgattactcttcctctgcgagacgacgatgaggaaaacgacacatacgaagctaaaatgctcctcataggcgagaatggtctcgacggtgagagtttacctcctactcctctgcgtgaccgtgcactggagctccagaagtacaacatcagctccatcgagtcaacagtcgtgattcgtgagctgacgtcacaaggtctctcctttcagctctggccagcggcttctactttcgtcacgttgcttgataactaccgacgtgaccctagcaagagtccactcaccgccacactcttgtcgctgaaaaaaccatcgccgttgaacatactcgagctcggatctggaaccggcctcgtcgggatcgctgcggcaatcactctctctgctaacgtcacggtgacggatctcccacacgtcttagataatctcaacttcaacgccgaagcaaacgctgaaattgttgagagattcggcgggaaagtcaacgtggcaccactacgatggggagaagctgatgacgtggaggttctcggacgcgtgg

SEQ ID NO: 998 - DNA, 752 bp, Arabidopsis thaliana
  misc_feature (1)...(752): n = A,T,C or G
gagtacggaaacccgatccagcagcagtatgacgagtacggaaatccgatgggaggaggaggatacggaactggtggtggtggaggagctacaggtggccaaggatacggaacaggtggccaagggtacggatcaggtggccaagggtacggaaccggtggccaaggatacggaaccgggaccgggactgaaggctttggaactggcggaggagctaggcaccacggccaagagcaactccacaaggaaagtggtggtggcttgggaggaatgcttcaccgctccggatctggatccagctctagctcggaggatgatggacaaggagggaggaggaagaagggaataacacaaaagatcaaggagaagttgccaggtcatcataatcagtctggtcaagctcaagcgatgggcggcatgggatccggatatgatggtggtggctacggtggtgagcaccacgagaagaaggggatgatggacaagatcaaggaaaagcttcccggtggtggccgttaagcttcgaacaatcgtgtatacatattaaataaaaataatgagggtttgtaacgcagtcgcattcggtcgttgtattgtgctttttatgtatgtaagtcctgcgatgtgtgttgtttacttacatgagtgtgtaatgagcatctggctctnnnnnnnnnctgagatgtttgtgttatgtaatttcacatctatataaatctactttcttctgaaaaaaaaaaaaaaaaaaaaaa

SEQ ID NO: 999 - DNA, 752 bp, Arabidopsis thaliana
gattgattttagttttgatgatgacattgaataaaataagaaacatatctccaaggttcttggaagatttagattctaccaaactgatgtcaaaagatttactacaacaagaaattctttaacatccaaagataacaacttaaaataagctagaatcaacaaaaatctttaaagatcaaaacactttttaaccagtgatgttctgagacttgttgaggataactccttcatacttgacctggaaccatttcattgcatcatccttggttactctgtgttgaataccaacacgagtcttgcatctacggcggcgagccacacgatatcctgggcgttcaaggacaacgtaaaagtccattccgtagataccagtggaaggatcgtacttgattccaagatcaatgtgctcttggataccaaatccaaagcaaccagtgtcactgaagttcctcctaagaagctcatactccttaactttcaaaccactctcaagaagctgcattgccttctcacctctcacagtcacataacacgcaatcttctcattacgcctgataccaaaagacctcacagtgtacctcgccttagagaagacaggggtttgtccactgagctgctccaacaccttggaggcacgagtgagacgatcaccactctcaccaacggaaatgttgagaacaagtttctgaaccttaatgtccctcatggggttcgagagcttcttctccgacgccattttaaggagatcaatg

What is claimed is:

1. A nucleic acid comprising a sequence capable of hybridizing under stringent conditions to a sequence set forth in SEQ ID NO:1 to 999, or a fragment thereof.

2. A vector comprising the nucleic acid of claim 1.

3. The vector of claim 2, wherein said vector comprises regulatory elements for expression, operably linked to said sequence.

4. A polypeptide encoded by the nucleic acid of claim 1.

5. A nucleic acid comprising: an ATG start codon; an optional intervening sequence; a coding sequence capable of hybridizing under stringent conditions as set forth in SEQ ID NO:1 to 999; and an optional terminal sequence, wherein at least one of said optional sequences is present, and wherein:
ATG is a start codon;
said intervening sequence comprises one or more codons in-frame with said coding sequence, and is free of in-frame stop codons; and
said terminal sequence comprises one or more codons in-frame with said coding sequence, and a terminal stop codon.

6. The nucleic acid of claim 5, wherein said nucleic acid is expressed in Arabidopsis thaliana.

7. The nucleic acid of claim 5, wherein said nucleic acid encodes a plant protein.

8. The nucleic acid of claim 7, wherein said plant is a dicot.

9. The nucleic acid of claim 8, wherein said dicot is Arabidopsis thaliana.

10. The nucleic acid of claim 7, wherein said plant protein is a naturally occurring plant protein.

11. The nucleic acid of claim 7, wherein said plant protein is a genetically modified plant protein.

12. The nucleic acid of claim 5, wherein said nucleic acid encodes a fusion protein comprising an Arabidopsis thaliana protein and a fusion partner.

13. The nucleic acid of claim 5 wherein said nucleic acid encodes a fusion protein comprising a plant protein and a fusion partner.

14. A transgenic plant comprising an exogenous nucleic acid, wherein said nucleic acid comprises transcription regulatory sequences operably linked to a sequence capable of hybridizing under stringent conditions to a sequence set forth in SEQ ID NO:1 to 999 or a fragment thereof, wherein said sequence is expressed in cells of said plant.

15. The transgenic plant of claim 14, wherein said plant is regenerated from transformed embryogenic tissue.

16. The transgenic plant of claim 14, wherein said plant is a progeny of one or more subsequent generations from transformed embryogenic tissue.

17. The transgenic plant of claim 14, wherein said sequence capable of hybridizing under stringent conditions to a sequence set forth in SEQ ID NO:1 to 999 encodes a plant protein.

18. The transgenic plant of claim 14, wherein said plant protein is a naturally occurring plant protein.

19. The transgenic plant of claim 14, wherein said plant protein is a genetically altered plant protein.

20. The transgenic plant of claim 14, wherein said sequence expressed in cells of said plant is an anti-sense sequence.

21. The transgenic plant of claim 14, wherein said sequence expressed in cells of said plant is a sense sequence.

22. The transgenic plant of claim 14, wherein said sequence is selectively expressed in specific tissues of said plant.

23. The transgenic plant of claim 14, wherein said specific tissue is selected from the group consisting of leaves, stems, roots, flowers, tissues, epicotyls, meristems, hypocotyls, cotyledons, pollen, ovaries, cells, and protoplasts.

24. A genetically modified cell, comprising an exogenous nucleic acid, wherein said nucleic acid comprises transcription regulatory sequences operably linked to a sequence capable of hybridizing under stringent conditions to a sequence set forth in SEQ ID NO:1 to 999, wherein said sequence is expressed in cells of said plant.

25. A method of screening a candidate agent for its biological effect; the method comprising:
combining said candidate agent with one of:
a genetically modified cell according to claim 24, a transgenic plant according to claim 14, or a polypeptide according to claim 4; and
determining the effect of said candidate agent on said plant, cell or polypeptide.

26. A nucleic acid array comprising at least one nucleic acid as set forth in SEQ ID NO:1-999 stably bound to a solid support.

27. An array comprising at least one polypeptide encoded by a nucleic acid as set forth in SEQ ID NO:1-999, stably bound to a solid support.
